(19) United States
(12) Patent Application Publication
(10) Pub. No.: US 2002/0051977 A1
(43) Pub. Date: May 2, 2002

(54) Compositions and methods for the therapy and diagnosis of prostate cancer

(76) Inventors: Jiangchun Xu, Bellevue, WA (US); Davin C. Dillon, Issaquah, WA (US); Jennifer L. Mitcham, Redmond, WA (US); Susan L. Harlocker, Seattle, WA (US); Yuqiu Jiang, Kent, WA (US); Michael D. Kalos, Seattle, WA (US); Gary R. Fanger, Mill Creek, WA (US); Marc W. Retter, Carnation, WA (US); John A. Stolk, Bothell, WA (US); Craig H. Day, Seattle, WA (US); Thomas S. Vedvick, Federal Way, WA (US); Darrick Carter, Seattle, WA (US); Samuel X. Li, Redmond, WA (US); Aijun Wang, Issaquah, WA (US); Yasir A. W. Skeiky, Bellevue, WA (US); William T. Hepler, Seattle, WA (US); Robert A. Henderson, Edmonds, WA (US); John Hural, Bainbridge Island, WA (US); Patricia D. McNeill, Des Moines, WA (US); Raymond L. Houghton, Bothell, WA (US)

Correspondence Address: SEED INTELLECTUAL PROPERTY LAW GROUP PLLC, 701 FIFTH AVE, SUITE 6300, SEATTLE, WA, 98104-7092, US

(21) Appl. No.: 09/780,669

(22) Filed: Feb. 9, 2001

Related U.S. Application Data
(63) Continuation-in-part of application No. 09/759,143, filed on Jan. 12, 2001.
(63) Continuation-in-part of application No. 09/709,729, filed on Nov. 9, 2000.
(63) Continuation-in-part of application No. 09/685,166, filed on Oct. 10, 2000.
(63) Continuation-in-part of application No. 09/679,426, filed on Oct. 2, 2000.
(63) Continuation-in-part of application No. 09/657,279, filed on Sep. 6, 2000.
(63) Continuation-in-part of application No. 09/651,236, filed on Aug. 29, 2000.
(63) Continuation-in-part of application No. 09/636,215, filed on Aug. 10, 2000.
(63) Continuation-in-part of application No. 09/605,783, filed on Jun. 27, 2000.
(63) Continuation-in-part of application No. 09/593,793, filed on Jun. 13, 2000.
(63) Continuation-in-part of application No. 09/510,737, filed on May 1, 2000, now Pat. No. 6,219,981.
(63) Continuation-in-part of application No. 09/568,100, filed on May 9, 2000.
(63) Continuation-in-part of application No. 09/536,857, filed on Mar. 27, 2000.
(63) Continuation-in-part of application No. 09/483,672, filed on Jan. 14, 2000.
(63) Continuation-in-part of application No. 09/443,686, filed on Nov. 18, 1999, now abandoned.
(63) Continuation-in-part of application No. 09/439,313, filed on Nov. 12, 1999.
(63) Continuation-in-part of application No. 09/352,616, filed on Jul. 13, 1999.
(63) Continuation-in-part of application No. 09/288,946, filed on Apr. 9, 1999.
(63) Continuation-in-part of application No. 09/232,149, filed on Jan. 15, 1999.
(63) Continuation-in-part of application No. 09/159,812, filed on Sep. 23, 1998.
(63) Continuation-in-part of application No. 09/115,453, filed on Jul. 14, 1998.
(63) Continuation-in-part of application No. 09/030,607, filed on Feb. 25, 1998, now Pat. No. 6,262,245.
(63) Continuation-in-part of application No. 09/020,956, filed on Feb. 9, 1998, now Pat. No. 6,261,562.
(63) Continuation-in-part of application No. 08/904,804, filed on Aug. 1, 1997, now abandoned.
(63) Continuation-in-part of application No. 08/806,099, filed on Feb. 25, 1997, now abandoned.
(63) Continuation-in-part of application No. PCT/US98/03492, filed on Feb. 25, 1998.
(63) Continuation-in-part of application No. PCT/US99/15838, filed on Jul. 14, 1999.

(51) Int. Cl. A61K 48/00; A61K 39/00; C12Q 1/68; G01N 33/574; C07K 14/435

(52) U.S. Cl. 435/6; 424/184.1; 424/93.21; 435/7.23; 435/69.3; 530/350

(57) ABSTRACT

Compositions and methods for the therapy and diagnosis of cancer, particularly prostate cancer, are disclosed. Illustrative compositions comprise one or more prostate-specific polypeptides, immunogenic portions thereof, polynucleotides that encode such polypeptides, antigen presenting cell that expresses such polypeptides, and T cells that are specific for cells expressing such polypeptides. The disclosed compositions are useful, for example, in the diagnosis, prevention and/or treatment of diseases, particularly prostate cancer.

### CROSS REFERENCE TO RELATED APPLICATIONS

[0001] This application is related to U.S. patent application Ser. No. 09/759,143, filed Jan. 12, 2001, U.S. patent application Ser. No. 09/709,729, filed Nov. 9, 2000, U.S. patent application Ser. No. 09/685,166, filed Oct. 10, 2000, U.S. patent application Ser. No. 09/679,426, filed Oct. 2, 2000, U.S. patent application Ser. No. 09/657,279, filed Sep. 6, 2000; U.S. application Ser. No. 09/651,236, filed Aug. 29, 2000; U.S. application Ser. No. 09/636,215, filed Aug. 9, 2000; U.S. application Ser. No. 09/605,783, filed Jun. 27, 2000; U.S. application Ser. No. 09/593,793, filed Jun. 13, 2000; U.S. application Ser. No. 09/510,737, filed May 12, 2000; U.S. application Ser. No. 09/568,100, filed May 9, 2000; U.S. application Ser. No. 09/536,857, filed Mar. 27, 2000; U.S. application Ser. No. 09/483,672, filed Jan. 14, 2000; U.S. application Ser. No. 09/443,686, filed Nov. 18, 1999; U.S. application Ser. No. 09/439,313, filed Nov. 12, 1999; U.S. application Ser. No. 09/352,616, filed Jul. 13, 1999; U.S. application Ser. No. 09/288,946, filed Apr. 9, 1999; U.S. application Ser. No. 09/232,149, filed Jan. 15, 1999; U.S. application Ser. No. 09/159,812, filed Sep. 23, 1998; U.S. application Ser. No. 09/115,453, filed Jul. 14, 1998; U.S. application Ser. No. 09/030,607, filed Feb. 25, 1998; U.S. application Ser. No. 09/020,956, filed Feb. 9, 1998; U.S. application Ser. No. 08/904,804, filed Aug. 1, 1997 (abandoned); U.S. application Ser. No. 08/806,099, filed Feb. 25, 1997 (abandoned); each a CIP of the previously filed application and pending unless noted; and PCT/U.S.98/03492, filed Feb. 25, 1998 (converted) and PCT/U.S.99/15838, filed Jul. 14, 1999, pending.

### TECHNICAL FIELD OF THE INVENTION

[0002] The present invention relates generally to therapy and diagnosis of cancer, such as prostate cancer. The invention is more specifically related to polypeptides, comprising at least a portion of a prostate-specific protein, and to polynucleotides encoding such polypeptides. Such polypeptides and polynucleotides are useful in pharmaceutical compositions, e.g., vaccines, and other compositions for the diagnosis and treatment of prostate cancer.

### BACKGROUND OF THE INVENTION

[0003] Cancer is a significant health problem throughout the world. Although Cancer is a significant health problem throughout the world. Although advances have been made in detection and therapy of cancer, no vaccine or other universally successful method for prevention or treatment is currently available. Current therapies, which are generally based on a combination of chemotherapy or surgery and radiation, continue to prove inadequate in many patients.

[0004] Prostate cancer is the most common form of cancer among males, with an estimated incidence of 30% in men over the age of 50. Overwhelming clinical evidence shows that human prostate cancer has the propensity to metastasize to bone, and the disease appears to progress inevitably from androgen dependent to androgen refractory status, leading to increased patient mortality. This prevalent disease is currently the second leading cause of cancer death among men in the U.S.

[0005] In spite of considerable research into therapies for the disease, prostate cancer remains difficult to treat. Commonly, treatment is based on surgery and/or radiation therapy, but these methods are ineffective in a significant percentage of cases. Two previously identified prostate specific proteins—prostate specific antigen (PSA) and prostatic acid phosphatase (PAP)—have limited therapeutic and diagnostic potential. For example, PSA levels do not always correlate well with the presence of prostate cancer, being positive in a percentage of non-prostate cancer cases, including benign prostatic hyperplasia (BPH). Furthermore, PSA measurements correlate with prostate volume, and do not indicate the level of metastasis.

[0006] In spite of considerable research into therapies for these and other cancers, prostate cancer remains difficult to diagnose and treat effectively. Accordingly, there is a need in the art for improved methods for detecting and treating such cancers. The present invention fulfills these needs and further provides other related advantages.

### SUMMARY OF THE INVENTION

[0007] In one aspect, the present invention provides polynucleotide compositions comprising a sequence selected from the group consisting of:

[0008] (a) sequences provided in SEQ ID NO: 1-111, 115-171, 173-175, 177, 179-305, 307-315, 326, 328, 330, 332-335, 340-375, 381, 382 and 384-476, 524, 526, 530, 531, 533, 535, 536, 552, 569-572, 587, 591, 593-606, 618-705, 709-774, 777, 789, 817, 823, 824, 878, 880-882, 894, 896, 907, 908, 916-919, 929-931, 938, 939 and 942;

[0009] (b) complements of the sequences provided in SEQ ID NO: 1- 111, 115-171, 173-175, 177, 179-305, 307-315, 326, 328, 330, 332-335, 340-375, 381, 382 and 384-476, 524, 526, 530, 531, 533, 535, 536, 552, 569-572, 587, 591, 593-606, 618-705, 709-774, 777, 789, 817, 823, 824, 878, 880-882, 894, 896, 907, 908, 916-919, 929-931, 938, 939 and 942;

[0010] (c) sequences consisting of at least 20 contiguous residues of a sequence provided in SEQ ID NO: 1-111, 115-171, 173-175, 177, 179-305, 307-315, 326, 328, 330, 332-335, 340-375, 381, 382 and 384-476, 524, 526, 530, 531, 533, 535, 536, 552, 569-572, 587, 591, 593-606, 618-705, 709-774, 777, 789, 817, 823, 824, 878, 880-882, 894, 896, 907, 908, 916-919, 929-931, 938, 939 and 942;

[0011] (d) sequences that hybridize to a sequence provided in SEQ ID NO: 1-111, 115-171, 173-175, 177, 179-305, 307-315, 326, 328, 330, 332-335, 340-375, 381, 382 and 384-476, 524, 526, 530, 531, 533, 535, 536, 552, 569-572, 587, 591, 593-606, 618-705, 709-774, 777, 789, 817, 823, 824, 878, 880-882, 894, 896, 907, 908, 916-919, 929-931, 938, 939 and 942, under moderately stringent conditions;

[0012] (e) sequences having at least 75% identity to a sequence of SEQ ID NO: 1-111, 115-171, 173-175, 177, 179-305, 307-315, 326, 328, 330, 332-335, 340-375, 381, 382 and 384-476, 524, 526, 530, 531, 533, 535, 536, 552, 569-572, 587, 591, 593-606, 618-705, 709-774, 777, 789, 817, 823, 824, 878, 880-882, 894, 896, 907, 908, 916-919, 929-931, 938, 939 and 942;

[0013] (f) sequences having at least 90% identity to a sequence of SEQ ID NO: 1-111, 115-171, 173-175, 177, 179-305, 307-315, 326, 328, 330, 332-335, 340-375, 381, 382 and 384-476, 524, 526, 530, 531, 533, 535, 536, 552, 569-572, 587, 591, 593-606, 618-705, 709-774, 777, 789, 817, 823, 824, 878, 880-882, 894, 896, 907, 908, 916-919, 929-931, 938, 939 and 942; and

[0014] (g) degenerate variants of a sequence provided in SEQ ID NO: 1-111, 115-171, 173-175, 177, 179-305, 307-315, 326, 328, 330, 332-335, 340-375, 381, 382 and 384-476, 524, 526, 530, 531, 533, 535, 536, 552, 569-572, 587, 591, 593-606, 618-705, 709-774, 777, 789, 817, 823, 824, 878, 880-882, 894, 896, 907, 908, 916-919, 929-931, 938, 939 and 942.

[0015] In one preferred embodiment, the polynucleotide compositions of the invention are expressed in at least about 20%, more preferably in at least about 30%, and most preferably in at least about 50% of prostate tissue samples tested, at a level that is at least about 2-fold, preferably at least about 5-fold, and most preferably at least about 10-fold higher than that for other normal tissues.

[0016] The present invention, in another aspect, provides polypeptide compositions comprising an amino acid sequence that is encoded by a polynucleotide sequence described above.

[0017] The present invention further provides polypeptide compositions comprising an amino acid sequence selected from the group consisting of sequences recited in SEQ ID NO: 112-114, 172, 176, 178, 327, 329, 331, 336, 339, 376-380, 383, 477-483, 496, 504, 505, 519, 520, 522, 525, 527, 532, 534, 537-551, 553-568, 573-586, 588-590, 592, 706-708, 775, 776, 778, 780, 781, 811, 814, 818, 826, 827, 853, 855, 858, 860-862, 866-877, 879, 883-893, 895, 897, 898, 909-915, 920-928, 932-934, 940, 941 and 943.

[0018] In certain preferred embodiments, the polypeptides and/or polynucleotides of the present invention are immunogenic, i.e., they are capable of eliciting an immune response, particularly a humoral and/or cellular immune response, as further described herein.

[0019] The present invention further provides fragments, variants and/or derivatives of the disclosed polypeptide and/or polynucleotide sequences, wherein the fragments, variants and/or derivatives preferably have a level of immunogenic activity of at least about 50%, preferably at least about 70% and more preferably at least about 90% of the level of immunogenic activity of a polypeptide sequence set forth in SEQ ID NO: 112-114, 172, 176, 178, 327, 329, 331, 336, 339, 376-380, 383, 477-483, 496, 504, 505, 519, 520, 522, 525, 527, 532, 534, 537-551, 553-568, 573-586, 588-590, 592, 706-708, 775, 776, 778, 780, 781, 811, 814, 818, 826, 827, 853, 855, 858 or 860-862, or a polypeptide sequence encoded by a polynucleotide sequence set forth in SEQ ID NO: 1-111, 115-171, 173-175, 177, 179-305, 307-315, 326, 328, 330, 332-335, 340-375, 381, 382 and 384-476, 524, 526, 530, 531, 533, 535, 536, 552, 569-572, 587, 591, 593-606, 618-705, 709-774, 777, 789, 817, 823, 824, 878, 880-882, 894, 896, 907, 908, 916-919, 929-931, 938, 939 and 942.

[0020] The present invention further provides polynucleotides that encode a polypeptide described above, expression vectors comprising such polynucleotides and host cells transformed or transfected with such expression vectors.

[0021] Within other aspects, the present invention provides pharmaceutical compositions comprising a polypeptide or polynucleotide as described above and a physiologically acceptable carrier.

[0022] Within a related aspect of the present invention, pharmaceutical compositions, e.g., vaccine compositions, are provided for prophylactic or therapeutic applications. Such compositions generally comprise an immunogenic polypeptide or polynucleotide of the invention and an immunostimulant, such as an adjuvant, together with a physiologically acceptable carrier.

[0023] The present invention further provides pharmaceutical compositions that comprise: (a) an antibody or antigen-binding fragment thereof that specifically binds to a polypeptide of the present invention, or a fragment thereof; and (b) a physiologically acceptable carrier.

[0024] Within further aspects, the present invention provides pharmaceutical compositions comprising: (a) an antigen presenting cell that expresses a polypeptide as described above and (b) a pharmaceutically acceptable carrier or excipient. Illustrative antigen presenting cells include dendritic cells, macrophages, monocytes, fibroblasts and B cells.

[0025] Within related aspects, pharmaceutical compositions are provided that comprise: (a) an antigen presenting cell that expresses a polypeptide as described above and (b) an immunostimulant.

[0026] The present invention further provides, in other aspects, fusion proteins that comprise at least one polypeptide as described above, as well as polynucleotides encoding such fusion proteins, typically in the form of pharmaceutical compositions, e.g., vaccine compositions, comprising a physiologically acceptable carrier and/or an immunostimulant. The fusions proteins may comprise multiple immunogenic polypeptides or portions/variants thereof, as described herein, and may further comprise one or more polypeptide segments for facilitating and/or enhancing the expression, purification and/or immunogenicity of the polypeptide(s).

[0027] Within further aspects, the present invention provides methods for stimulating an immune response in a patient, preferably a T cell response in a human patient, comprising administering a pharmaceutical composition described herein. The patient may be afflicted with prostate cancer, in which case the methods provide treatment for the disease, or a patient considered to be at risk for such a disease may be treated prophylactically.

[0028] Within further aspects, the present invention provides methods for inhibiting the development of a cancer in a patient, comprising administering to a patient a pharmaceutical composition as recited above. The patient may be afflicted with prostate cancer, in which case the methods provide treatment for the disease, or a patient considered to be at risk for such a disease may be treated prophylactically.

[0029] The present invention further provides, within other aspects, methods for removing tumor cells from a biological sample, comprising contacting a biological sample with T cells that specifically react with a polypeptide of the present invention, wherein the step of contacting is performed under conditions and for a time sufficient to permit the removal of cells expressing the polypeptide from the sample.

[0030] Within related aspects, methods are provided for inhibiting the development of a cancer in a patient, comprising administering to a patient a biological sample treated as described above.

[0031] Methods are further provided, within other aspects, for stimulating and/or expanding T cells specific for a polypeptide of the present invention, comprising contacting T cells with one or more of: (i) a polypeptide as described above; (ii) a polynucleotide encoding such a polypeptide; and (iii) an antigen presenting cell that expresses such a polypeptide; under conditions and for a time sufficient to permit the stimulation and/or expansion of T cells. Isolated T cell populations comprising T cells prepared as described above are also provided.

[0032] Within further aspects, the present invention provides methods for inhibiting the development of a cancer in a patient, comprising administering to a patient an effective amount of a T cell population as described above.

[0033] The present invention further provides methods for inhibiting the development of a cancer in a patient, comprising the steps of: (a) incubating CD4⁺and/or CD8⁺T cells isolated from a patient with one or more of: (i) a polypeptide comprising at least an immunogenic portion of polypeptide disclosed herein; (ii) a polynucleotide encoding such a polypeptide; and (iii) an antigen-presenting cell that expressed such a polypeptide; and (b) administering to the patient an effective amount of the proliferated T cells, thereby inhibiting the development of a cancer in the patient. Proliferated cells may, but need not, be cloned prior to administration to the patient.

[0034] Within further aspects, the present invention provides methods for determining the presence or absence of a cancer, preferably a prostate cancer, in a patient comprising: (a) contacting a biological sample obtained from a patient with a binding agent that binds to a polypeptide as recited above; (b) detecting in the sample an amount of polypeptide that binds to the binding agent; and (c) comparing the amount of polypeptide with a predetermined cut-off value, and therefrom determining the presence or absence of a cancer in the patient. Within preferred embodiments, the binding agent is an antibody, more preferably a monoclonal antibody.

[0035] The present invention also provides, within other aspects, methods for monitoring the progression of a cancer in a patient. Such methods comprise the steps of: (a) contacting a biological sample obtained from a patient at a first point in time with a binding agent that binds to a polypeptide as recited above; (b) detecting in the sample an amount of polypeptide that binds to the binding agent; (c) repeating steps (a) and (b) using a biological sample obtained from the patient at a subsequent point in time; and (d) comparing the amount of polypeptide detected in step (c) with the amount detected in step (b), and therefrom monitoring the progression of the cancer in the patient.

[0036] The present invention further provides, within other aspects, methods for determining the presence or absence of a cancer in a patient, comprising the steps of: (a) contacting a biological sample obtained from a patient with an oligonucleotide that hybridizes to a polynucleotide of the present invention; (b) detecting in the sample a level of a polynucleotide, preferably MRNA, that hybridizes to the oligonucleotide; and (c) comparing the level of polynucleotide that hybridizes to the oligonucleotide with a predetermined cut-off value, and therefrom determining the presence or absence of a cancer in the patient. Within certain embodiments, the amount of mRNA is detected via polymerase chain reaction using, for example, at least one oligonucleotide primer that hybridizes to a polynucleotide of the present invention, or a complement of such a polynucleotide. Within other embodiments, the amount of mRNA is detected using a hybridization technique, employing an oligonucleotide probe that hybridizes to an inventive polynucleotide, or a complement of such a polynucleotide.

[0037] In related aspects, methods are provided for monitoring the progression of a cancer in a patient, comprising the steps of: (a) contacting a biological sample obtained from a patient with an oligonucleotide that hybridizes to a polynucleotide of the present invention; (b) detecting in the sample an amount of a polynucleotide that hybridizes to the oligonucleotide; (c) repeating steps (a) and (b) using a biological sample obtained from the patient at a subsequent point in time; and (d) comparing the amount of polynucleotide detected in step (c) with the amount detected in step (b), and therefrom monitoring the progression of the cancer in the patient.

[0038] Within further aspects, the present invention provides antibodies, such as monoclonal antibodies, that bind to a polypeptide as described above, as well as diagnostic kits comprising such antibodies. Diagnostic kits comprising one or more oligonucleotide probes or primers as described above are also provided.

[0039] These and other aspects of the present invention will become apparent upon reference to the following detailed description and attached drawings. All references disclosed herein are hereby incorporated by reference in their entirety as if each was incorporated individually.

### BRIEF DESCRIPTION OF THE DRAWINGS AND SEQUENCE IDENTIFIERS

[0040] FIG. 1 illustrates the ability of T cells to kill fibroblasts expressing the representative prostate-specific polypeptide P502S, as compared to control fibroblasts. The percentage lysis is shown as a series of effector:target ratios, as indicated.

[0041] FIGS. 2A and 2B illustrate the ability of T cells to recognize cells expressing the representative prostate-specific polypeptide P502S. In each case, the number of y-interferon spots is shown for different numbers of responders. In FIG. 2A, data is presented for fibroblasts pulsed with the P2S-12 peptide, as compared to fibroblasts pulsed with a control E75 peptide. In FIG. 2B, data is presented for fibroblasts expressing P502S, as compared to fibroblasts expressing HER-2/neu.

[0042] FIG. 3 represents a peptide competition binding assay showing that the P1S#10 peptide, derived from P501S, binds HLA-A2. Peptide P1S#10 inhibits HLA-A2 restricted presentation of fluM58 peptide to CTL clone D150M58 in TNF release bioassay. D150M58 CTL is specific for the HLA-A2 binding influenza matrix peptide fluM58.

[0043] FIG. 4 illustrates the ability of T cell lines generated from P1S#10 immunized mice to specifically lyse P1S#10-pulsed Jurkat A2Kb targets and P501S-transduced Jurkat A2Kb targets, as compared to EGFP-transduced Jurkat A2Kb. The percent lysis is shown as a series of effector to target ratios, as indicated.

[0044] FIG. 5 illustrates the ability of a T cell clone to recognize and specifically lyse Jurkat A2Kb cells expressing the representative prostate-specific polypeptide P501S, thereby demonstrating that the P1S#10 peptide may be a naturally processed epitope of the P501S polypeptide.

[0045] FIGS. 6A and 6B are graphs illustrating the specificity of a CD8⁺cell line (3A-1) for a representative prostate-specific antigen (P501S). FIG. 6A shows the results of a ⁵¹Cr release assay. The percent specific lysis is shown as a series of effector:target ratios, as indicated. FIG. 6B shows the production of interferon-gamma by 3A-1 cells stimulated with autologous B-LCL transduced with P501S, at varying effector:target rations as indicated.

[0046] FIG. 7 is a Western blot showing the expression of P501S in baculovirus.

[0047] FIG. 8 illustrates the results of epitope mapping studies on P501S.

[0048] FIG. 9 is a schematic representation of the P501S protein showing the location of transmembrane domains and predicted intracellular and extracellular domains.

[0049] FIG. 10 is a genomic map showing the location of the prostate genes P775P, P704P, B305D, P712P and P774P within the Cat Eye Syndrome region of chromosome 22q11.2

[0050] FIG. 11 shows the results of an ELISA assay to determine the specificity of rabbit polyclonal antisera raised against P501S.

[0051] FIGS. 12A(1), 12A(2), 12A(3), and B are the full-length cDNA (SEQ ID NO:591) and predicted amino acid (SEQ ID NO:592) sequences, respectively, for the clone P788P.

[0052] SEQ ID NO: 1 is the determined cDNA sequence for F1-13

[0053] SEQ ID NO: 2 is the determined 3′ cDNA sequence for F1-12

[0054] SEQ ID NO: 3 is the determined 5′ cDNA sequence for F1-12

[0055] SEQ ID NO: 4 is the determined 3′ cDNA sequence for F1-16

[0056] SEQ ID NO: 5 is the determined 3′ cDNA sequence for H1-1

[0057] SEQ ID NO: 6 is the determined 3′ cDNA sequence for H1-9

[0058] SEQ ID NO: 7 is the determined 3′ cDNA sequence for H1-4

[0059] SEQ ID NO: 8 is the determined 3′ cDNA sequence for J1-17

[0060] SEQ ID NO: 9 is the determined 5′ cDNA sequence for J1-17

[0061] SEQ ID NO: 10 is the determined 3′ cDNA sequence for L1-12

[0062] SEQ ID NO: 11 is the determined 5′ cDNA sequence for L1-12

[0063] SEQ ID NO: 12 is the determined 3′ cDNA sequence for N1-1862

[0064] SEQ ID NO: 13 is the determined 5′ cDNA sequence for N1-1862

[0065] SEQ ID NO: 14 is the determined 3′ cDNA sequence for J1-13

[0066] SEQ ID NO: 15 is the determined 5′ cDNA sequence for J1-13

[0067] SEQ ID NO: 16 is the determined 3′ cDNA sequence for J1-19

[0068] SEQ ID NO: 17 is the determined 5′ cDNA sequence for J1-19

[0069] SEQ ID NO: 18 is the determined 3′ cDNA sequence for J1-25

[0070] SEQ ID NO: 19 is the determined 5′ cDNA sequence for J1-25

[0071] SEQ ID NO: 20 is the determined 5′ cDNA sequence for J1-24

[0072] SEQ ID NO: 21 is the determined 3′ cDNA sequence for J1-24

[0073] SEQ ID NO: 22 is the determined 5′ cDNA sequence for K1-58

[0074] SEQ ID NO: 23 is the determined 3′ cDNA sequence for K1-58

[0075] SEQ ID NO: 24 is the determined 5′ cDNA sequence for K1-63

[0076] SEQ ID NO: 25 is the determined 3′ cDNA sequence for K1-63

[0077] SEQ ID NO: 26 is the determined 5′ cDNA sequence for L1-4

[0078] SEQ ID NO: 27 is the determined 3′ cDNA sequence for L1-4

[0079] SEQ ID NO: 28 is the determined 5′ cDNA sequence for L1-14

[0080] SEQ ID NO: 29 is the determined 3′ cDNA sequence for L1-14

[0081] SEQ ID NO: 30 is the determined 3′ cDNA sequence for J1-12

[0082] SEQ ID NO: 31 is the determined 3′ cDNA sequence for J1-16

[0083] SEQ ID NO: 32 is the determined 3′ cDNA sequence for J1-21

[0084] SEQ ID NO: 33 is the determined 3′ cDNA sequence for K1-48

[0085] SEQ ID NO: 34 is the determined 3′ cDNA sequence for K1-55

[0086] SEQ ID NO: 35 is the determined 3′ cDNA sequence for L1-2

[0087] SEQ ID NO: 36 is the determined 3′ cDNA sequence for L1-6

[0088] SEQ ID NO: 37 is the determined 3′ cDNA sequence for N1-1858

[0089] SEQ ID NO: 38 is the determined 3′ cDNA sequence for N1-1860

[0090] SEQ ID NO: 39 is the determined 3′ cDNA sequence for N1-1861

[0091] SEQ ID NO: 40 is the determined 3′ cDNA sequence for N1-1864

[0092] SEQ ID NO: 41 is the determined cDNA sequence for P5

[0093] SEQ ID NO: 42 is the determined cDNA sequence for P8

[0094] SEQ ID NO: 43 is the determined cDNA sequence for P9

[0095] SEQ ID NO: 44 is the determined cDNA sequence for P18

[0096] SEQ ID NO: 45 is the determined cDNA sequence for P20

[0097] SEQ ID NO: 46 is the determined cDNA sequence for P29

[0098] SEQ ID NO: 47 is the determined cDNA sequence for P30

[0099] SEQ ID NO: 48 is the determined cDNA sequence for P34

[0100] SEQ ID NO: 49 is the determined cDNA sequence for P36

[0101] SEQ ID NO: 50 is the determined cDNA sequence for P38

[0102] SEQ ID NO: 51 is the determined cDNA sequence for P39

[0103] SEQ ID NO: 52 is the determined cDNA sequence for P42

[0104] SEQ ID NO: 53 is the determined cDNA sequence for P47

[0105] SEQ ID NO: 54 is the determined cDNA sequence for P49

[0106] SEQ ID NO: 55 is the determined cDNA sequence for P50

[0107] SEQ ID NO: 56 is the determined cDNA sequence for P53

[0108] SEQ ID NO: 57 is the determined cDNA sequence for P55

[0109] SEQ ID NO: 58 is the determined cDNA sequence for P60

[0110] SEQ ID NO: 59 is the determined cDNA sequence for P64

[0111] SEQ ID NO: 60 is the determined cDNA sequence for P65

[0112] SEQ ID NO: 61 is the determined cDNA sequence for P73

[0113] SEQ ID NO: 62 is the determined cDNA sequence for P75

[0114] SEQ ID NO: 63 is the determined cDNA sequence for P76

[0115] SEQ ID NO: 64 is the determined cDNA sequence for P79

[0116] SEQ ID NO: 65 is the determined cDNA sequence for P84

[0117] SEQ ID NO: 66 is the determined cDNA sequence for P68

[0118] SEQ ID NO: 67 is the determined cDNA sequence for P80 (also referred to as P704P)

[0119] SEQ ID NO: 68 is the determined cDNA sequence for P82

[0120] SEQ ID NO: 69 is the determined cDNA sequence for U1-3064

[0121] SEQ ID NO: 70 is the determined cDNA sequence for U1-3065

[0122] SEQ ID NO: 71 is the determined cDNA sequence for V1-3692

[0123] SEQ ID NO: 72 is the determined cDNA sequence for 1A-3905

[0124] SEQ ID NO: 73 is the determined cDNA sequence for V1-3686

[0125] SEQ ID NO: 74 is the determined cDNA sequence for R1-2330

[0126] SEQ ID NO: 75 is the determined cDNA sequence for 1B-3976

[0127] SEQ ID NO: 76 is the determined cDNA sequence for V1-3679

[0128] SEQ ID NO: 77 is the determined cDNA sequence for 1G-4736

[0129] SEQ ID NO: 78 is the determined cDNA sequence for 1G-4738

[0130] SEQ ID NO: 79 is the determined cDNA sequence for 1G-4741

[0131] SEQ ID NO: 80 is the determined cDNA sequence for 1G-4744

[0132] SEQ ID NO: 81 is the determined cDNA sequence for 1G-4734

[0133] SEQ ID NO: 82 is the determined cDNA sequence for 1H-4774

[0134] SEQ ID NO: 83 is the determined cDNA sequence for 1H-4781

[0135] SEQ ID NO: 84 is the determined cDNA sequence for 1H-4785

[0136] SEQ ID NO: 85 is the determined cDNA sequence for 1H-4787

[0137] SEQ ID NO: 86 is the determined cDNA sequence for 1H-4796

[0138] SEQ ID NO: 87 is the determined cDNA sequence for 1I-4807

[0139] SEQ ID NO: 88 is the determined cDNA sequence for 1I-4810

[0140] SEQ ID NO: 89 is the determined cDNA sequence for 1I-4811

[0141] SEQ ID NO: 90 is the determined cDNA sequence for 1J-4876

[0142] SEQ ID NO: 91 is the determined cDNA sequence for 1K-4884

[0143] SEQ ID NO: 92 is the determined cDNA sequence for 1K-4896

[0144] SEQ ID NO: 93 is the determined cDNA sequence for 1G-4761

[0145] SEQ ID NO: 94 is the determined cDNA sequence for 1G-4762

[0146] SEQ ID NO: 95 is the determined cDNA sequence for 1H-4766

[0147] SEQ ID NO: 96 is the determined cDNA sequence for 1H-4770

[0148] SEQ ID NO: 97 is the determined cDNA sequence for 1H-4771

[0149] SEQ ID NO: 98 is the determined cDNA sequence for 1H-4772

[0150] SEQ ID NO: 99 is the determined cDNA sequence for 1D-4297

[0151] SEQ ID NO: 100 is the determined cDNA sequence for 1D-4309

[0152] SEQ ID NO: 101 is the determined cDNA sequence for 1D.1-4278

[0153] SEQ ID NO: 102 is the determined cDNA sequence for 1D-4288

[0154] SEQ ID NO: 103 is the determined cDNA sequence for 1D-4283

[0155] SEQ ID NO: 104 is the determined cDNA sequence for 1D-4304

[0156] SEQ ID NO: 105 is the determined cDNA sequence for 1D-4296

[0157] SEQ ID NO: 106 is the determined cDNA sequence for 1D-4280

[0158] SEQ ID NO: 107 is the determined full length cDNA sequence for F1-12 (also referred to as P504S)

[0159] SEQ ID NO: 108 is the predicted amino acid sequence for F1-12

[0160] SEQ ID NO: 109 is the determined full length cDNA sequence for J1-17

[0161] SEQ ID NO: 110 is the determined full length cDNA sequence for L1-12 (also referred to as P501S)

[0162] SEQ ID NO: 111 is the determined full length cDNA sequence for N1-1862 (also referred to as P503S)

[0163] SEQ ID NO: 112 is the predicted amino acid sequence for J1-17

[0164] SEQ ID NO: 113 is the predicted amino acid sequence for L1-12 (also referred to as P501S)

[0165] SEQ ID NO: 114 is the predicted amino acid sequence for N1-1862 (also referred to as P503S)

[0166] SEQ ID NO: 115 is the determined cDNA sequence for P89

[0167] SEQ ID NO: 116 is the determined cDNA sequence for P90

[0168] SEQ ID NO: 117 is the determined cDNA sequence for P92

[0169] SEQ ID NO: 118 is the determined cDNA sequence for P95

[0170] SEQ ID NO: 119 is the determined cDNA sequence for P98

[0171] SEQ ID NO: 120 is the determined cDNA sequence for P102

[0172] SEQ ID NO: 121 is the determined cDNA sequence for P110

[0173] SEQ ID NO: 122 is the determined cDNA sequence for P111

[0174] SEQ ID NO: 123 is the determined cDNA sequence for P114

[0175] SEQ ID NO: 124 is the determined cDNA sequence for P115

[0176] SEQ ID NO: 125 is the determined cDNA sequence for P116

[0177] SEQ ID NO: 126 is the determined cDNA sequence for P124

[0178] SEQ ID NO: 127 is the determined cDNA sequence for P126

[0179] SEQ ID NO: 128 is the determined cDNA sequence for P130

[0180] SEQ ID NO: 129 is the determined cDNA sequence for P133

[0181] SEQ ID NO: 130 is the determined cDNA sequence for P138

[0182] SEQ ID NO: 131 is the determined cDNA sequence for P143

[0183] SEQ ID NO: 132 is the determined cDNA sequence for P151

[0184] SEQ ID NO: 133 is the determined cDNA sequence for P156

[0185] SEQ ID NO: 134 is the determined cDNA sequence for P157

[0186] SEQ ID NO: 135 is the determined cDNA sequence for P166

[0187] SEQ ID NO: 136 is the determined cDNA sequence for P176

[0188] SEQ ID NO: 137 is the determined cDNA sequence for P178

[0189] SEQ ID NO: 138 is the determined cDNA sequence for P179

[0190] SEQ ID NO: 139 is the determined cDNA sequence for P185

[0191] SEQ ID NO: 140 is the determined cDNA sequence for P192

[0192] SEQ ID NO: 141 is the determined cDNA sequence for P201

[0193] SEQ ID NO: 142 is the determined cDNA sequence for P204

[0194] SEQ ID NO: 143 is the determined cDNA sequence for P208

[0195] SEQ ID NO: 144 is the determined cDNA sequence for P211

[0196] SEQ ID NO: 145 is the determined cDNA sequence for P213

[0197] SEQ ID NO: 146 is the determined cDNA sequence for P219

[0198] SEQ ID NO: 147 is the determined cDNA sequence for P237

[0199] SEQ ID NO: 148 is the determined cDNA sequence for P239

[0200] SEQ ID NO: 149 is the determined cDNA sequence for P248

[0201] SEQ ID NO: 150 is the determined cDNA sequence for P251

[0202] SEQ ID NO: 151 is the determined cDNA sequence for P255

[0203] SEQ ID NO: 152 is the determined cDNA sequence for P256

[0204] SEQ ID NO: 153 is the determined cDNA sequence for P259

[0205] SEQ ID NO: 154 is the determined cDNA sequence for P260

[0206] SEQ ID NO: 155 is the determined cDNA sequence for P263

[0207] SEQ ID NO: 156 is the determined cDNA sequence for P264

[0208] SEQ ID NO: 157 is the determined cDNA sequence for P266

[0209] SEQ ID NO: 158 is the determined cDNA sequence for P270

[0210] SEQ ID NO: 159 is the determined cDNA sequence for P272

[0211] SEQ ID NO: 160 is the determined cDNA sequence for P278

[0212] SEQ ID NO: 161 is the determined cDNA sequence for P105

[0213] SEQ ID NO: 162 is the determined cDNA sequence for P107

[0214] SEQ ID NO: 163 is the determined cDNA sequence for P137

[0215] SEQ ID NO: 164 is the determined cDNA sequence for P194

[0216] SEQ ID NO: 165 is the determined cDNA sequence for P195

[0217] SEQ ID NO: 166 is the determined cDNA sequence for P196

[0218] SEQ ID NO: 167 is the determined cDNA sequence for P220

[0219] SEQ ID NO: 168 is the determined cDNA sequence for P234

[0220] SEQ ID NO: 169 is the determined cDNA sequence for P235

[0221] SEQ ID NO: 170 is the determined cDNA sequence for P243

[0222] SEQ ID NO: 171 is the determined cDNA sequence for P703P-DE1

[0223] SEQ ID NO: 172 is the predicted amino acid sequence for P703P-DE1

[0224] SEQ ID NO: 173 is the determined cDNA sequence for P703P-DE2

[0225] SEQ ID NO: 174 is the determined cDNA sequence for P703P-DE6

[0226] SEQ ID NO: 175 is the determined cDNA sequence for P703P-DE13

[0227] SEQ ID NO: 176 is the predicted amino acid sequence for P703P-DE13

[0228] SEQ ID NO: 177 is the determined cDNA sequence for P703P-DE14

[0229] SEQ ID NO: 178 is the predicted amino acid sequence for P703P-DE14

[0230] SEQ ID NO: 179 is the determined extended cDNA sequence for 1G-4736

[0231] SEQ ID NO: 180 is the determined extended cDNA sequence for 1G-4738

[0232] SEQ ID NO: 181 is the determined extended cDNA sequence for IG-4741

[0233] SEQ ID NO: 182 is the determined extended cDNA sequence for 1G-4744

[0234] SEQ ID NO: 183 is the determined extended cDNA sequence for IH-4774

[0235] SEQ ID NO: 184 is the determined extended cDNA sequence for IH-4781

[0236] SEQ ID NO: 185 is the determined extended =DNA sequence for 1H-4785

[0237] SEQ ID NO: 186 is the determined extended cDNA sequence for 1H-4787

[0238] SEQ ID NO: 187 is the determined extended cDNA sequence for 1H-4796

[0239] SEQ ID NO: 188 is the determined extended cDNA sequence for 11-4807

[0240] SEQ ID NO: 189 is the determined 3′ cDNA sequence for 11-4810

[0241] SEQ ID NO: 190 is the determined 3′ cDNA sequence for 11- 4811

[0242] SEQ ID NO: 191 is the determined extended cDNA sequence for IJ-4876

[0243] SEQ ID NO: 192 is the determined extended eDNA sequence for 1K-4884

[0244] SEQ ID NO: 193 is the determined extended cDNA sequence for IK-4896

[0245] SEQ ID NO: 194 is the determined extended cDNA sequence for 1G-4761

[0246] SEQ ID NO: 195 is the determined extended cDNA sequence for IG-4762

[0247] SEQ ID NO: 196 is the determined extended cDNA sequence for 1H-4766

[0248] SEQ ID NO: 197 is the determined 3′ cDNA sequence for 1H- 4770

[0249] SEQ ID NO: 198 is the determined 3′ cDNA sequence for 1H-4771

[0250] SEQ ID NO: 199 is the determined extended cDNA sequence for 1H-4772

[0251] SEQ ID NO: 200 is the determined extended cDNA sequence for 1D-4309

[0252] SEQ ID NO: 201 is the determined extended cDNA sequence for 1D.1-4278

[0253] SEQ ID NO: 202 is the determined extended cDNA sequence for 1D-4288

[0254] SEQ ID NO: 203 is the determined extended cDNA sequence for 1D-4283

[0255] SEQ ID NO: 204 is the determined extended cDNA sequence for 1D-4304

[0256] SEQ ID NO: 205 is the determined extended cDNA sequence for 1D-4296

[0257] SEQ ID NO: 206 is the determined extended cDNA sequence for 1D-4280

[0258] SEQ ID NO: 207 is the determined cDNA sequence for 10-d8fwd

[0259] SEQ ID NO: 208 is the determined cDNA sequence for 10-H10con

[0260] SEQ ID NO: 209 is the determined cDNA sequence for 11-C8rev

[0261] SEQ ID NO: 210 is the determined cDNA sequence for 7.g6fwd

[0262] SEQ ID NO: 211 is the determined cDNA sequence for 7.g6rev

[0263] SEQ ID NO: 212 is the determined cDNA sequence for 8-b5fwd

[0264] SEQ ID NO: 213 is the determined cDNA sequence for 8-b5rev

[0265] SEQ ID NO: 214 is the determined cDNA sequence for 8-b6fwd

[0266] SEQ ID NO: 215 is the determined cDNA sequence for 8-b6 rev

[0267] SEQ ID NO: 216 is the determined cDNA sequence for 8-d4fwd

[0268] SEQ ID NO: 217 is the determined cDNA sequence for 8-d9rev

[0269] SEQ ID NO: 218 is the determined cDNA sequence for 8-g3fwd

[0270] SEQ ID NO: 219 is the determined cDNA sequence for 8-g3rev

[0271] SEQ ID NO: 220 is the determined cDNA sequence for 8-h11rev

[0272] SEQ ID NO: 221 is the determined cDNA sequence for g-f12fwd

[0273] SEQ ID NO: 222 is the determined cDNA sequence for g-f3rev

[0274] SEQ ID NO: 223 is the determined cDNA sequence for P509S

[0275] SEQ ID NO: 224 is the determined cDNA sequence for P510S

[0276] SEQ ID NO: 225 is the determined cDNA sequence for P703DE5

[0277] SEQ ID NO: 226 is the determined cDNA sequence for 9-A11

[0278] SEQ ID NO: 227 is the determined cDNA sequence for 8-C6

[0279] SEQ ID NO: 228 is the determined cDNA sequence for 8-H7

[0280] SEQ ID NO: 229 is the determined cDNA sequence for JPTPN13

[0281] SEQ ID NO: 230 is the determined cDNA sequence for JPTPN14

[0282] SEQ ID NO: 231 is the determined cDNA sequence for JPTPN23

[0283] SEQ ID NO: 232 is the determined cDNA sequence for JPTPN24

[0284] SEQ ID NO: 233 is the determined cDNA sequence for JPTPN25

[0285] SEQ ID NO: 234 is the determined cDNA sequence for JPTPN30

[0286] SEQ ID NO: 235 is the determined cDNA sequence for JPTPN34

[0287] SEQ ID NO: 236 is the determined cDNA sequence for PTPN35

[0288] SEQ ID NO: 237 is the determined cDNA sequence for JPTPN36

[0289] SEQ ID NO: 238 is the determined cDNA sequence for JPTPN38

[0290] SEQ ID NO: 239 is the determined cDNA sequence for JPTPN39

[0291] SEQ ID NO: 240 is the determined cDNA sequence for JPTPN40

[0292] SEQ ID NO: 241 is the determined cDNA sequence for JPTPN41

[0293] SEQ ID NO: 242 is the determined cDNA sequence for JPTPN42

[0294] SEQ ID NO: 243 is the determined cDNA sequence for JPTPN45

[0295] SEQ ID NO: 244 is the determined cDNA sequence for JPTPN46

[0296] SEQ ID NO: 245 is the determined cDNA sequence for JPTPN51

[0297] SEQ ID NO: 246 is the determined cDNA sequence for JPTPN56

[0298] SEQ ID NO: 247 is the determined cDNA sequence for PTPN64

[0299] SEQ ID NO: 248 is the determined cDNA sequence for JPTPN65

[0300] SEQ ID NO: 249 is the determined cDNA sequence for JPTPN67

[0301] SEQ ID NO: 250 is the determined cDNA sequence for JPTPN76

[0302] SEQ ID NO: 251 is the determined cDNA sequence for JPTPN84

[0303] SEQ ID NO: 252 is the determined cDNA sequence for JPTPN85

[0304] SEQ ID NO: 253 is the determined cDNA sequence for JPTPN86

[0305] SEQ ID NO: 254 is the determined cDNA sequence for JPTPN87

[0306] SEQ ID NO: 255 is the determined cDNA sequence for JPTPN88

[0307] SEQ ID NO: 256 is the determined cDNA sequence for JP1F1

[0308] SEQ ID NO: 257 is the determined cDNA sequence for JP1F2

[0309] SEQ ID NO: 258 is the determined cDNA sequence for JP1C2

[0310] SEQ ID NO: 259 is the determined cDNA sequence for JP1B1

[0311] SEQ ID NO: 260 is the determined cDNA sequence for JP1B2

[0312] SEQ ID NO: 261 is the determined cDNA sequence for JP1D3

[0313] SEQ ID NO: 262 is the determined cDNA sequence for JP1A4

[0314] SEQ ID NO: 263 is the determined cDNA sequence for JP1F5

[0315] SEQ ID NO: 264 is the determined cDNA sequence for JP1E6

[0316] SEQ ID NO: 265 is the determined cDNA sequence for JP1D6

[0317] SEQ ID NO: 266 is the determined cDNA sequence for JP1B5

[0318] SEQ ID NO: 267 is the determined cDNA sequence for JP1A6

[0319] SEQ ID NO: 268 is the determined cDNA sequence for JP1E8

[0320] SEQ ID NO: 269 is the determined cDNA sequence for JP1D7

[0321] SEQ ID NO: 270 is the determined cDNA sequence for JP1D9

[0322] SEQ ID NO: 271 is the determined cDNA sequence for JP1C10

[0323] SEQ ID NO: 272 is the determined cDNA sequence for JP1A9

[0324] SEQ ID NO: 273 is the determined cDNA sequence for JP1F12

[0325] SEQ ID NO: 274 is the determined cDNA sequence for JP1E12

[0326] SEQ ID NO: 275 is the determined cDNA sequence for JP1D11

[0327] SEQ ID NO: 276 is the determined cDNA sequence for JP1C11

[0328] SEQ ID NO: 277 is the determined cDNA sequence for JP1C12

[0329] SEQ ID NO: 278 is the determined cDNA sequence for JP1B12

[0330] SEQ ID NO: 279 is the determined cDNA sequence for JP1A12

[0331] SEQ ID NO: 280 is the determined cDNA sequence for JP8G2

[0332] SEQ ID NO: 281 is the determined cDNA sequence for JP8H1

[0333] SEQ ID NO: 282 is the determined cDNA sequence for JP8H2

[0334] SEQ ID NO: 283 is the determined cDNA sequence for JP8A3

[0335] SEQ ID NO: 284 is the determined cDNA sequence for JP8A4

[0336] SEQ ID NO: 285 is the determined cDNA sequence for JP8C3

[0337] SEQ ID NO: 286 is the determined cDNA sequence for JP8G4

[0338] SEQ ID NO: 287 is the determined cDNA sequence for JP8B6

[0339] SEQ ID NO: 288 is the determined cDNA sequence for JP8D6

[0340] SEQ ID NO: 289 is the determined cDNA sequence for JP8F5

[0341] SEQ ID NO: 290 is the determined cDNA sequence for JP8A8

[0342] SEQ ID NO: 291 is the determined cDNA sequence for JP8C7

[0343] SEQ ID NO: 292 is the determined cDNA sequence for JP8D7

[0344] SEQ ID NO: 293 is the determined cDNA sequence for P8D8

[0345] SEQ ID NO: 294 is the determined cDNA sequence for JP8E7

[0346] SEQ ID NO: 295 is the determined cDNA sequence for JP8F8

[0347] SEQ ID NO: 296 is the determined cDNA sequence for JP8G8

[0348] SEQ ID NO: 297 is the determined cDNA sequence for JP8B10

[0349] SEQ ID NO: 298 is the determined cDNA sequence for JP8C10

[0350] SEQ ID NO: 299 is the determined cDNA sequence for JP8E9

[0351] SEQ ID NO: 300 is the determined cDNA sequence for JP8E10

[0352] SEQ ID NO: 301 is the determined cDNA sequence for JP8F9

[0353] SEQ ID NO: 302 is the determined cDNA sequence for JP8H9

[0354] SEQ ID NO: 303 is the determined cDNA sequence for JP8C12

[0355] SEQ ID NO: 304 is the determined cDNA sequence for JP8E11

[0356] SEQ ID NO: 305 is the determined cDNA sequence for JP8E12

[0357] SEQ ID NO: 306 is the amino acid sequence for the peptide PS2#12

[0358] SEQ ID NO: 307 is the determined cDNA sequence for P711P

[0359] SEQ ID NO: 308 is the determined cDNA sequence for P712P

[0360] SEQ ID NO: 309 is the determined cDNA sequence for CLONE23

[0361] SEQ ID NO: 310 is the determined cDNA sequence for P774P

[0362] SEQ ID NO: 311 is the determined cDNA sequence for P775P

[0363] SEQ ID NO: 312 is the determined cDNA sequence for P715P

[0364] SEQ ID NO: 313 is the determined cDNA sequence for P710P

[0365] SEQ ID NO: 314 is the determined cDNA sequence for P767P

[0366] SEQ ID NO: 315 is the determined cDNA sequence for P768P

[0367] SEQ ID NO: 316-325 are the determined cDNA sequences of previously isolated genes

[0368] SEQ ID NO: 326 is the determined cDNA sequence for P703PDE5

[0369] SEQ ID NO: 327 is the predicted amino acid sequence for P703PDE5

[0370] SEQ ID NO: 328 is the determined cDNA sequence for P703P6.26

[0371] SEQ ID NO: 329 is the predicted amino acid sequence for P703P6.26

[0372] SEQ ID NO: 330 is the determined cDNA sequence for P703PX-23

[0373] SEQ ID NO: 331 is the predicted amino acid sequence for P703PX-23

[0374] SEQ ID NO: 332 is the determined full length cDNA sequence for P509S

[0375] SEQ ID NO: 333 is the determined extended cDNA sequence for P707P (also referred to as 11-C9)

[0376] SEQ ID NO: 334 is the determined cDNA sequence for P714P

[0377] SEQ ID NO: 335 is the determined cDNA sequence for P705P (also referred to as 9-F3)

[0378] SEQ ID NO: 336 is the predicted amino acid sequence for P705P

[0379] SEQ ID NO: 337 is the amino acid sequence of the peptide P1S#10

[0380] SEQ ID NO: 338 is the amino acid sequence of the peptide p5

[0381] SEQ ID NO: 339 is the predicted amino acid sequence of P509S

[0382] SEQ ID NO: 340 is the determined cDNA sequence for P778P

[0383] SEQ ID NO: 341 is the determined cDNA sequence for P786P

[0384] SEQ ID NO: 342 is the determined cDNA sequence for P789P

[0385] SEQ ID NO: 343 is the determined cDNA sequence for a clone showing homology to Homo sapiens MM46 mRNA

[0386] SEQ ID NO: 344 is the determined cDNA sequence for a clone showing homology to Homo sapiens TNF-alpha stimulated ABC protein (ABC50) mRNA

[0387] SEQ ID NO: 345 is the determined cDNA sequence for a clone showing homology to Homo sapiens mRNA for E-cadherin

[0388] SEQ ID NO: 346 is the determined cDNA sequence for a clone showing homology to Human nuclear-encoded mitochondrial serine hydroxymethyltransferase (SHMT)

[0389] SEQ ID NO: 347 is the determined cDNA sequence for a clone showing homology to Homo sapiens natural resistance-associated macrophage protein2 (NRAMP2)

[0390] SEQ ID NO: 348 is the determined cDNA sequence for a clone showing homology to Homo sapiens phosphoglucomutase-related protein (PGMRP)

[0391] SEQ ID NO: 349 is the determined cDNA sequence for a clone showing homology to Human MRNA for proteosome subunit p40

[0392] SEQ ID NO: 350 is the determined cDNA sequence for P777P

[0393] SEQ ID NO: 351 is the determined cDNA sequence for P779P

[0394] SEQ ID NO: 352 is the determined cDNA sequence for P790P

[0395] SEQ ID NO: 353 is the determined cDNA sequence for P784P

[0396] SEQ ID NO: 354 is the determined cDNA sequence for P776P

[0397] SEQ ID NO: 355 is the determined cDNA sequence for P780P

[0398] SEQ ID NO: 356 is the determined cDNA sequence for P544S

[0399] SEQ ID NO: 357 is the determined cDNA sequence for P745S

[0400] SEQ ID NO: 358 is the determined cDNA sequence for P782P

[0401] SEQ ID NO: 359 is the determined cDNA sequence for P783P

[0402] SEQ ID NO: 360 is the determined cDNA sequence for unknown 17984

[0403] SEQ ID NO: 361 is the determined cDNA sequence for P787P

[0404] SEQ ID NO: 362 is the determined cDNA sequence for P788P

[0405] SEQ ID NO: 363 is the determined cDNA sequence for unknown 17994

[0406] SEQ ID NO: 364 is the determined cDNA sequence for P781P

[0407] SEQ ID NO: 365 is the determined cDNA sequence for P785P

[0408] SEQ ID NO: 366-375 are the determined cDNA sequences for splice variants of B305D.

[0409] SEQ ID NO: 376 is the predicted amino acid sequence encoded by the sequence of SEQ ID NO: 366.

[0410] SEQ ID NO: 377 is the predicted amino acid sequence encoded by the sequence of SEQ ID NO: 372.

[0411] SEQ ID NO: 378 is the predicted amino acid sequence encoded by the sequence of SEQ ID NO: 373.

[0412] SEQ ID NO: 379 is the predicted amino acid sequence encoded by the sequence of SEQ ID NO: 374.

[0413] SEQ ID NO: 380 is the predicted amino acid sequence encoded by the sequence of SEQ ID NO: 375.

[0414] SEQ ID NO: 381 is the determined cDNA sequence for B716P.

[0415] SEQ ID NO: 382 is the determined full-length cDNA sequence for P711P.

[0416] SEQ ID NO: 383 is the predicted amino acid sequence for P711P.

[0417] SEQ ID NO: 384 is the cDNA sequence for P1000C.

[0418] SEQ ID NO: 385 is the cDNA sequence for CGI-82.

[0419] SEQ ID NO:386 is the cDNA sequence for 23320.

[0420] SEQ ID NO:387 is the cDNA sequence for CGI-69.

[0421] SEQ ID NO:388 is the cDNA sequence for L-iditol-2-dehydrogenase.

[0422] SEQ ID NO:389 is the cDNA sequence for 23379.

[0423] SEQ ID NO:390 is the cDNA sequence for 23381.

[0424] SEQ ID NO:391 is the cDNA sequence for KIAA122.

[0425] SEQ ID NO:392 is the cDNA sequence for 23399.

[0426] SEQ ID NO:393 is the cDNA sequence for a previously identified gene.

[0427] SEQ ID NO:394 is the cDNA sequence for HCLBP.

[0428] SEQ ID NO:395 is the cDNA sequence for transglutaminase.

[0429] SEQ ID NO:396 is the cDNA sequence for a previously identified gene.

[0430] SEQ ID NO:397 is the cDNA sequence for PAP.

[0431] SEQ ID NO:398 is the cDNA sequence for Ets transcription factor PDEF.

[0432] SEQ ID NO:399 is the cDNA sequence for hTGR.

[0433] SEQ ID NO:400 is the cDNA sequence for KIAA0295.

[0434] SEQ ID NO:401 is the cDNA sequence for 22545.

[0435] SEQ ID NO:402 is the cDNA sequence for 22547.

[0436] SEQ ID NO:403 is the cDNA sequence for 22548.

[0437] SEQ ID NO:404 is the cDNA sequence for 22550.

[0438] SEQ ID NO:405 is the cDNA sequence for 22551.

[0439] SEQ ID NO:406 is the cDNA sequence for 22552.

[0440] SEQ ID NO:407 is the cDNA sequence for 22553 (also known as P1020C).

[0441] SEQ ID NO:408 is the cDNA sequence for 22558.

[0442] SEQ ID NO:409 is the cDNA sequence for 22562.

[0443] SEQ ID NO:410 is the cDNA sequence for 22565.

[0444] SEQ ID NO:411 is the cDNA sequence for 22567.

[0445] SEQ ID NO:412 is the cDNA sequence for 22568.

[0446] SEQ ID NO:413 is the cDNA sequence for 22570.

[0447] SEQ ID NO:414 is the cDNA sequence for 22571.

[0448] SEQ ID NO:415 is the cDNA sequence for 22572.

[0449] SEQ ID NO:416 is the cDNA sequence for 22573.

[0450] SEQ ID NO:417 is the cDNA sequence for 22573.

[0451] SEQ ID NO:418 is the cDNA sequence for 22575.

[0452] SEQ ID NO:419 is the cDNA sequence for 22580.

[0453] SEQ ID NO:420 is the cDNA sequence for 22581.

[0454] SEQ ID NO:421 is the cDNA sequence for 22582.

[0455] SEQ ID NO:422 is the cDNA sequence for 22583.

[0456] SEQ ID NO:423 is the cDNA sequence for 22584.

[0457] SEQ ID NO:424 is the cDNA sequence for 22585.

[0458] SEQ ID NO:425 is the cDNA sequence for 22586.

[0459] SEQ ID NO:426 is the cDNA sequence for 22587.

[0460] SEQ ID NO:427 is the cDNA sequence for 22588.

[0461] SEQ ID NO:428 is the cDNA sequence for 22589.

[0462] SEQ ID NO:429 is the cDNA sequence for 22590.

[0463] SEQ ID NO:430 is the cDNA sequence for 22591.

[0464] SEQ ID NO:431 is the cDNA sequence for 22592.

[0465] SEQ ID NO:432 is the cDNA sequence for 22593.

[0466] SEQ ID NO:433 is the cDNA sequence for 22594.

[0467] SEQ ID NO:434 is the cDNA sequence for 22595.

[0468] SEQ ID NO:435 is the cDNA sequence for 22596.

[0469] SEQ ID NO:436 is the cDNA sequence for 22847.

[0470] SEQ ID NO:437 is the cDNA sequence for 22848.

[0471] SEQ ID NO:438 is the cDNA sequence for 22849.

[0472] SEQ ID NO:439 is the cDNA sequence for 22851.

[0473] SEQ ID NO:440 is the cDNA sequence for 22852.

[0474] SEQ ID NO:441 is the cDNA sequence for 22853.

[0475] SEQ ID NO:442 is the cDNA sequence for 22854.

[0476] SEQ ID NO:443 is the cDNA sequence for 22855.

[0477] SEQ ID NO:444 is the cDNA sequence for 22856.

[0478] SEQ ID NO:445 is the cDNA sequence for 22857.

[0479] SEQ ID NO:446 is the cDNA sequence for 23601.

[0480] SEQ ID NO:447 is the cDNA sequence for 23602.

[0481] SEQ ID NO:448 is the cDNA sequence for 23605.

[0482] SEQ ID NO:449 is the cDNA sequence for 23606.

[0483] SEQ ID NO:450 is the cDNA sequence for 23612.

[0484] SEQ ID NO:451 is the cDNA sequence for 23614.

[0485] SEQ ID NO:452 is the cDNA sequence for 23618.

[0486] SEQ ID NO:453 is the cDNA sequence for 23622.

[0487] SEQ ID NO:454 is the cDNA sequence for folate hydrolase.

[0488] SEQ ID NO:455 is the cDNA sequence for LIM protein.

[0489] SEQ ID NO:456 is the cDNA sequence for a known gene.

[0490] SEQ ID NO:457 is the cDNA sequence for a known gene.

[0491] SEQ ID NO:458 is the cDNA sequence for a previously identified gene.

[0492] SEQ ID NO:459 is the cDNA sequence for 23045.

[0493] SEQ ID NO:460 is the cDNA sequence for 23032.

[0494] SEQ ID NO:461 is the cDNA sequence for cone 23054.

[0495] SEQ ID NO:462-467 are cDNA sequences for known genes.

[0496] SEQ ID NO:468-471 are cDNA sequences for P710P.

[0497] SEQ ID NO:472 is a cDNA sequence for P1001C.

[0498] SEQ ID NO: 473 is the determined cDNA sequence for a first splice variant of P775P (referred to as 27505).

[0499] SEQ ID NO: 474 is the determined cDNA sequence for a second splice variant of P775P (referred to as 19947).

[0500] SEQ ID NO: 475 is the determined cDNA sequence for a third splice variant of P775P (referred to as 19941).

[0501] SEQ ID NO: 476 is the determined cDNA sequence for a fourth splice variant of P775P (referred to as 19937).

[0502] SEQ ID NO: 477 is a first predicted amino acid sequence encoded by the sequence of SEQ ID NO: 474.

[0503] SEQ ID NO: 478 is a second predicted amino acid sequence encoded by the sequence of SEQ ID NO: 474.

[0504] SEQ ID NO: 479 is the predicted amino acid sequence encoded by the sequence of SEQID NO: 475.

[0505] SEQ ID NO: 480 is a first predicted amino acid sequence encoded by the sequence of SEQ ID NO: 473.

[0506] SEQ ID NO: 481 is a second predicted amino acid sequence encoded by the sequence of SEQ ID NO: 473.

[0507] SEQ ID NO: 482 is a third predicted amino acid sequence encoded by the sequence of SEQ ID NO: 473.

[0508] SEQ ID NO: 483 is a fourth predicted amino acid sequence encoded by the sequence of SEQ ID NO: 473.

[0509] SEQ ID NO: 484 is the first 30 amino acids of the M. tuberculosis antigen Ra12.

[0510] SEQ ID NO: 485 is the PCR primer AW025.

[0511] SEQ ID NO: 486 is the PCR primer AW003.

[0512] SEQ ID NO: 487 is the PCR primer AW027.

[0513] SEQ ID NO: 488 is the PCR primer AW026.

[0514] SEQ ID NO: 489-501 are peptides employed in epitope mapping studies.

[0515] SEQ ID NO: 502 is the determined cDNA sequence of the complementarity determining region for the anti-P503S monoclonal antibody 20D4.

[0516] SEQ ID NO: 503 is the determined cDNA sequence of the complementarity determining region for the anti-P503S monoclonal antibody JA1.

[0517] SEQ ID NO: 504 & 505 are peptides employed in epitope mapping studies.

[0518] SEQ ID NO: 506 is the determined cDNA sequence of the complementarity determining region for the anti-P703P monoclonal antibody 8H2.

[0519] SEQ ID NO: 507 is the determined cDNA sequence of the complementarity determining region for the anti-P703P monoclonal antibody 7H8.

[0520] SEQ ID NO: 508 is the determined cDNA sequence of the complementarity determining region for the anti-P703P monoclonal antibody 2D4.

[0521] SEQ ID NO: 509-522 are peptides employed in epitope mapping studies.

[0522] SEQ ID NO: 523 is a mature form of P703P used to raise antibodies against P703P.

[0523] SEQ ID NO: 524 is the putative full-length cDNA sequence of P703P.

[0524] SEQ ID NO: 525 is the predicted amino acid sequence encoded by SEQ ID NO: 524.

[0525] SEQ ID NO: 526 is the full-length cDNA sequence for P790P.

[0526] SEQ ID NO: 527 is the predicted amino acid sequence for P790P.

[0527] SEQ ID NO: 528 & 529 are PCR primers.

[0528] SEQ ID NO: 530 is the cDNA sequence of a splice variant of SEQ ID NO: 366.

[0529] SEQ ID NO: 531 is the cDNA sequence of the open reading frame of SEQ ID NO: 530.

[0530] SEQ ID NO: 532 is the predicted amino acid encoded by the sequence of

[0531] SEQ ID NO: 531.

[0532] SEQ ID NO: 533 is the DNA sequence of a putative ORF of P775P.

[0533] SEQ ID NO: 534 is the predicted amino acid sequence encoded by SEQ ID NO: 533.

[0534] SEQ ID NO: 535 is a first full-length cDNA sequence for P510S.

[0535] SEQ ID NO: 536 is a second full-length cDNA sequence for P510S.

[0536] SEQ ID NO: 537 is the predicted amino acid sequence encoded by SEQ ID NO: 535.

[0537] SEQ ID NO: 538 is the predicted amino acid sequence encoded by SEQ ID NO: 536.

[0538] SEQ ID NO: 539 is the peptide P501S-370.

[0539] SEQ ID NO: 540 is the peptide P501S-376.

[0540] SEQ ID NO: 541-551 are epitopes of P501S.

[0541] SEQ ID NO: 552 is an extended cDNA sequence for P712P.

[0542] SEQ ID NO: 553-568 are the amino acid sequences encoded by predicted open reading frames within SEQ ID NO: 552.

[0543] SEQ ID NO: 569 is an extended cDNA sequence for P776P.

[0544] SEQ ID NO: 570 is the determined cDNA sequence for a splice variant of P776P referred to as contig 6.

[0545] SEQ ID NO: 571 is the determined cDNA sequence for a splice variant of P776P referred to as contig 7.

[0546] SEQ ID NO: 572 is the determined cDNA sequence for a splice variant of P776P referred to as contig 14.

[0547] SEQ ID NO: 573 is the amino acid sequence encoded by a first predicted ORF of SEQ ID NO: 570.

[0548] SEQ ID NO: 574 is the amino acid sequence encoded by a second predicted ORF of SEQ ID NO: 570.

[0549] SEQ ID NO: 575 is the amino acid sequence encoded by a predicted ORF of

[0550] SEQ IDNO: 571.

[0551] SEQ ID NO: 576-586 are amino acid sequences encoded by predicted ORFs of SEQ ID NO: 569.

[0552] SEQ ID NO: 587 is a DNA consensus sequence of the sequences of P767P and P777P.

[0553] SEQ ID NO: 588-590 are amino acid sequences encoded by predicted ORFs of SEQ ID NO: 587.

[0554] SEQ ID NO: 591 is an extended cDNA sequence for P1020C.

[0555] SEQ ID NO: 592 is the predicted amino acid sequence encoded by the sequence of SEQ ID NO: P1020C.

[0556] SEQ ID NO: 593 is a splice variant of P775P referred to as 50748.

[0557] SEQ ID NO: 594 is a splice variant of P775P referred to as 50717.SEQ ID NO: 595 is a splice variant of P775P referred to as 45985.

[0558] SEQ ID NO: 596 is a splice variant of P775P referred to as 38769.

[0559] SEQ ID NO: 597 is a splice variant of P775P referred to as 37922.

[0560] SEQ ID NO: 598 is a splice variant of P510S referred to as 49274.

[0561] SEQ ID NO: 599 is a splice variant of P510S referred to as 39487.

[0562] SEQ ID NO: 600 is a splice variant of P504S referred to as 5167.16.

[0563] SEQ ID NO: 601 is a splice variant of P504S referred to as 5167.16.

[0564] SEQ ID NO: 602 is a splice variant of P504S referred to as 5163.46.

[0565] SEQ ID NO: 603 is a splice variant of P504S referred to as 5163.42.

[0566] SEQ ID NO: 604 is a splice variant of P504S referred to as 5163.34.

[0567] SEQ ID NO: 605 is a splice variant of P504S referred to as 5163.17.

[0568] SEQ ID NO: 606 is a splice variant of P501S referred to as 10640.

[0569] SEQ ID NO: 607-615 are the sequences of PCR primers.

[0570] SEQ ID NO: 616 is the determined cDNA sequence of a fusion of P703P and PSA.

[0571] SEQ ID NO: 617 is the amino acid sequence of the fusion of P703P and PSA.

[0572] SEQ ID NO: 618-689 are determined cDNA sequences of prostate-specific clones.

[0573] SEQ ID NO: 690 is the cDNA sequence of the gene DD3.

[0574] SEQ ID NO: 691-697 are determined cDNA sequences of prostate-specific clones.

[0575] SEQ ID NO: 698 is an extended cDNA sequence for P714P.

[0576] SEQ ID NO: 699-701 are the cDNA sequences for splice variants of P704P.

[0577] SEQ ID NO: 702 is the cDNA sequence of a spliced variant of P553S referred to as P553S-14.

[0578] SEQ ID NO: 703 is the cDNA sequence of a spliced variant of P553S referred to as P553S-12.

[0579] SEQ ID NO: 704 is the cDNA sequence of a spliced variant of P553S referred to as P553S-10.

[0580] SEQ ID NO: 705 is the cDNA sequence of a spliced variant of P553S referred to as P553S-6.

[0581] SEQ ID NO: 706 is the amino acid sequence encoded by SEQ ID NO: 705.

[0582] SEQ ID NO: 707 is the amino acid sequence encoded by SEQ ID NO: 702 SEQ ID NO: 708 is a second amino acid sequence encoded by SEQ ID NO: 702.

[0583] SEQ ID NO: 709-772 are determined cDNA sequences of prostate-specific clones.

[0584] SEQ ID NO: 773 is a first full-length cDNA sequence for prostate-specific transglutaminase gene (also referred to herein as P558S).

[0585] SEQ ID NO: 774 is a second full-length cDNA sequence for prostate-specific transglutaminase gene.

[0586] SEQ ID NO: 775 is the amino acid sequence encoded by the sequence of SEQ ID NO: 773.

[0587] SEQ ID NO: 776 is the amino acid sequence encoded by the sequence of SEQ ID NO: 774.

[0588] SEQ ID NO: 777 is the full-length cDNA sequence for P788P.

[0589] SEQ ID NO: 778 is the amino acid sequence encoded by SEQ ID NO: 777.

[0590] SEQ ID NO: 779 is the determined cDNA sequence for a polymorphic variant of P788P.

[0591] SEQ ID NO: 780 is the amino acid sequence encoded by SEQ ID NO: 779.

[0592] SEQ ID NO: 781 is the amino acid sequence of peptide 4 from P703P.

[0593] SEQ ID NO: 782 is the cDNA sequence that encodes peptide 4 from P703P.

[0594] SEQ ID NO: 783-798 are the cDNA sequence encoding epitopes of P703P.

[0595] SEQ ID NO: 799-814 are the amino acid sequences of epitopes of P703P.

[0596] SEQ ID NO: 815 and 816 are PCR primers.

[0597] SEQ ID NO: 817 is the cDNA sequence encoding an N-terminal portion of P788P expressed in E. coli.

[0598] SEQ ID NO: 818 is the amino acid sequence of the N-terminal portion of P788P expressed in E. coli.

[0599] SEQ ID NO: 819 is the amino acid sequence of the M. tuberculosis antigen Ra12.

[0600] SEQ ID NO: 820 and 821 are PCR primers.

[0601] SEQ ID NO: 822 is the cDNA sequence for the Ral2-P510S-C construct.

[0602] SEQ ID NO: 823 is the cDNA sequence for the P510S-C construct.

[0603] SEQ ID NO: 824 is the cDNA sequence for the P510S-E3 construct.

[0604] SEQ ID NO: 825 is the amino acid sequence for the Ra12-P510S-C construct.

[0605] SEQ ID NO: 826 is the amino acid sequence for the P510S-C construct.

[0606] SEQ ID NO: 827 is the amino acid sequence for the P510S-E3 construct.

[0607] SEQ ID NO: 828-833 are PCR primers.

[0608] SEQ ID NO: 834 is the cDNA sequence of the construct Ra12-P775P-ORF 3.

[0609] SEQ ID NO: 835 is the amino acid sequence of the construct Ra12-P775P-ORF 3.

[0610] SEQ ID NO: 836 and 837 are PCR primers.

[0611] SEQ ID NO: 838 is the determined amino acid sequence for a P703P His tag fusion protein.

[0612] SEQ ID NO: 839 is the determined cDNA sequence for a P703P His tag fusion protein.

[0613] SEQ ID NO: 840 and 841 are PCR primers.

[0614] SEQ ID NO: 842 is the determined amino acid sequence for a P705P His tag fusion protein.

[0615] SEQ ID NO: 843 is the determined cDNA sequence for a P705P His tag fusion protein.

[0616] SEQ ID NO: 844 and 845 are PCR primers.

[0617] SEQ ID NO: 846 is the determined amino acid sequence for a P711P His tag fusion protein.

[0618] SEQ ID NO: 847 is the determined cDNA sequence for a P711P His tag fusion protein.

[0619] SEQ ID NO: 848 is the amino acid sequence of the M. tuberculosis antigen Ra12.

[0620] SEQ ID NO: 849 and 850 are PCR primers.

[0621] SEQ ID NO: 851 is the determined cDNA sequence for the construct Ra12-P501S-E2.

[0622] SEQ ID NO: 852 is the determined amino acid sequence for the construct Ra12-P501S-E2.

[0623] SEQ ID NO: 853 is the amino acid sequence for an epitope of P501S.

[0624] SEQ ID NO: 854 is the DNA sequence encoding SEQ ID NO: 853.

[0625] SEQ ID NO: 855 is the amino acid sequence for an epitope of P501S.

[0626] SEQ ID NO: 856 is the DNA sequence encoding SEQ ID NO: 855.

[0627] SEQ ID NO: 857 is a peptide employed in epitope mapping studies.

[0628] SEQ ID NO: 858 is the amino acid sequence for an epitope of P501S.

[0629] SEQ ID NO: 859 is the DNA sequence encoding SEQ ID NO: 858.

[0630] SEQ ID NO: 860-862 are the amino acid sequences for CD4 epitopes of P501S.

[0631] SEQ ID NO: 863-865 are the DNA sequences encoding the sequences of SEQ ID NO: 860-862.

[0632] SEQ ID NO: 866-877 are the amino acid sequences for putative CTL epitopes of P703P.

[0633] SEQ ID NO: 878 is the full-length cDNA sequence for P789P.

[0634] SEQ ID NO: 879 is the amino acid sequence encoded by SEQ ID NO: 878.

[0635] SEQ ID NO: 880 is the determined full-length cDNA sequence for the splice variant of P776P referred to as contig 6.

[0636] SEQ ID NO: 881-882 are determined full-length cDNA sequences for the splice variant of P776P referred to as contig 7.

[0637] SEQ ID NO: 883-887 are amino acid sequences encoded by SEQ ID NO: 880.

[0638] SEQ ID NO: 888-893 are amino acid sequences encoded by the splice variant of P776P referred to as contig 7.

[0639] SEQ ID NO: 894 is the full-length cDNA sequence for human transmembrane protease serine 2.

[0640] SEQ ID NO: 895 is the amino acid sequence encoded by SEQ ID NO: 894.

[0641] SEQ ID NO: 896 is the cDNA sequence encoding the first 209 amino acids of human transmembrane protease serine 2.

[0642] SEQ ID NO: 897 is the first 209 amino acids of human transmembrane protease serine 2.

[0643] SEQ ID NO: 898 is the amino acid sequence of peptide 296-322 of P501S.

[0644] SEQ ID NO: 899-902 are PCR primers.

[0645] SEQ ID NO: 903 is the determined cDNA sequence of the Vb chain of a T cell receptor for the P501S-specific T cell clone 4E5.

[0646] SEQ ID NO: 904 is the determined cDNA sequence of the Va chain of a T cell receptor for the P501S-specific T cell clone 4E5.

[0647] SEQ ID NO: 905 is the amino acid sequence encoded by SEQ ID NO 903.

[0648] SEQ ID NO: 906 is the amino acid sequence encoded by SEQ ID NO 904.

[0649] SEQ ID NO: 907 is the full-length open reading frame for P768P including stop codon.

[0650] SEQ ID NO: 908 is the full-length open reading frame for P768P without stop codon.

[0651] SEQ ID NO: 909 is the amino acid sequence encoded by SEQ ID NO: 908.

[0652] SEQ ID NO: 910-915 are the amino acid sequences for predicted domains of P768P.

[0653] SEQ ID NO: 916 is the full-length cDNA sequence of P835P.

[0654] SEQ ID NO: 917 is the cDNA sequence of the previously identified clone FLJ13581.

[0655] SEQ ID NO: 918 is the cDNA sequence of the open reading frame for P835P with stop codon.

[0656] SEQ ID NO: 919 is the cDNA sequence of the open reading frame for P835P without stop codon.

[0657] SEQ ID NO: 920 is the full-length amino acid sequence for P835P.

[0658] SEQ ID NO: 921-928 are the amino acid sequences of extracellular and intracellular domains of P835P.

[0659] SEQ ID NO: 929 is the full-length cDNA sequence for P1000C.

[0660] SEQ ID NO: 930 is the cDNA sequence of the open reading frame for P1000C, including stop codon.

[0661] SEQ ID NO: 931 is the cDNA sequence of the open reading frame for P1000C, without stop codon.

[0662] SEQ ID NO: 932 is the full-length amino acid sequence for P1000C.

[0663] SEQ ID NO: 933 is amino acids 1-100 of SEQ ID NO: 932.

[0664] SEQ ID NO: 934 is amino acids 100-492 of SEQ ID NO: 932.

[0665] SEQ ID NO: 935-937 are PCR primers.

[0666] SEQ ID NO: 938 is the cDNA sequence of the expressed full-length P767P coding region.

[0667] SEQ ID NO: 939 is the cDNA sequence of an expressed truncated P767P coding region.

[0668] SEQ ID NO: 940 is the amino acid sequence encoded by SEQ ID NO: 939.

[0669] SEQ ID NO: 941 is the amino acid sequence encoded by SEQ ID NO: 938.

[0670] SEQ ID NO: 942 is the DNA sequence of a CD4 epitope of P703P.

[0671] SEQ ID NO: 943 is the amino acid sequence of a CD4 epitope of P703P.

### DETAILED DESCRIPTION OF THE INVENTION

[0672] The present invention is directed generally to compositions and their use in the therapy and diagnosis of cancer, particularly prostate cancer. As described further below, illustrative compositions of the present invention include, but are not restricted to, polypeptides, particularly immunogenic polypeptides, polynucleotides encoding such polypeptides, antibodies and other binding agents, antigen presenting cells (APCs) and immune system cells (e.g., T cells).

[0673] The practice of the present invention will employ, unless indicated specifically to the contrary, conventional methods of virology, immunology, microbiology, molecular biology and recombinant DNA techniques within the skill of the art, many of which are described below for the purpose of illustration. Such techniques are explained fully in the literature. See, e.g., Sambrook, et al. Molecular Cloning: A Laboratory Manual (2nd Edition, 1989); Maniatis et al. Molecular Cloning: A Laboratory Manual (1982); DNA Cloning: A Practical Approach, vol. I & II (D. Glover, ed.); Oligonucleotide Synthesis (N. Gait, ed., 1984); Nucleic Acid Hybridization (B. Hames & S. Higgins, eds., 1985); Transcription and Translation (B. Hames & S. Higgins, eds., 1984); Animal Cell Culture (R. Freshney, ed., 1986); Perbal, A Practical Guide to Molecular Cloning (1984).

[0674] All publications, patents and patent applications cited herein, whether supra or infra, are hereby incorporated by reference in their entirety.

[0675] As used in this specification and the appended claims, the singular forms “a,” “an” and “the” include plural references unless the content clearly dictates otherwise.

[0676] Polypeptide Compositions

[0677] As used herein, the term “polypeptide” ″ is used in its conventional meaning, i.e., as a sequence of amino acids. The polypeptides are not limited to a specific length of the product; thus, peptides, oligopeptides, and proteins are included within the definition of polypeptide, and such terms may be used interchangeably herein unless specifically indicated otherwise. This term also does not refer to or exclude post-expression modifications of the polypeptide, for example, glycosylations, acetylations, phosphorylations and the like, as well as other modifications known in the art, both naturally occurring and non-naturally occurring. A polypeptide may be an entire protein, or a subsequence thereof. Particular polypeptides of interest in the context of this invention are amino acid subsequences comprising epitopes, i.e., antigenic determinants substantially responsible for the immunogenic properties of a polypeptide and being capable of evoking an immune response.

[0678] Particularly illustrative polypeptides of the present invention comprise those encoded by a polynucleotide sequence set forth in any one of SEQ ID NOs: 1-111, 115-171, 173-175, 177, 179-305, 307-315, 326, 328, 330, 332-335, 340-375, 381, 382 and 384-476, 524, 526, 530, 531, 533, 535, 536, 552, 569-572, 587, 591, 593-606, 618-705, 709-774, 777, 789, 817, 823, 824, 878, 880-882, 894, 896, 907, 908, 916-919, 929-931, 938, 939 and 942, or a sequence that hybridizes under moderately stringent conditions, or, alternatively, under highly stringent conditions, to a polynucleotide sequence set forth in any one of SEQ ID NOs: 1-111, 115-171, 173-175, 177, 179-305, 307-315, 326, 328, 330, 332-335, 340-375, 381, 382 and 384-476, 524, 526, 530, 531, 533, 535, 536, 552, 569-572, 587, 591, 593-606, 618-705, 709-774, 777, 789, 817, 823, 824, 878, 880-882, 894, 896, 907, 908, 916-919, 929-931, 938, 939 and 942. In specific embodiments, the polypeptides of the invention comprise amino acid sequences as set forth in any one of SEQ ID NO: 112-114, 172, 176, 178, 327, 329, 331, 336, 339, 376-380, 383, 477-483, 496, 504, 505, 519, 520, 522, 525, 527, 532, 534, 537-551, 553-568, 573-586, 588-590, 592, 706-708, 775, 776, 778, 780, 781, 811, 814, 818, 826, 827, 853, 855, 858, 860-862, 866-877, 879, 883-893, 895, 897, 898, 909-915, 920-928, 932-934, 940, 941 and 943.

[0679] The polypeptides of the present invention are sometimes herein referred to as prostate-specific proteins or prostate-specific polypeptides, as an indication that their identification has been based at least in part upon their increased levels of expression in prostate tissue samples. Thus, a “prostate-specific polypeptide” or “prostate-specific protein,” refers generally to a polypeptide sequence of the present invention, or a polynucleotide sequence encoding such a polypeptide, that is expressed in a substantial proportion of prostate tissue samples, for example preferably greater than about 20%, more preferably greater than about 30%, and most preferably greater than about 50% or more of prostate tissue samples tested, at a level that is at least two fold, and preferably at least five fold, greater than the level of expression in other normal tissues, as determined using a representative assay provided herein. A prostate-specific polypeptide sequence of the invention, based upon its increased level of expression in tumor cells, has particular utility both as a diagnostic marker as well as a therapeutic target, as further described below.

[0680] In certain preferred embodiments, the polypeptides of the invention are immunogenic, i.e., they react detectably within an immunoassay (such as an ELISA or T-cell stimulation assay) with antisera and/or T-cells from a patient with prostate cancer. Screening for immunogenic activity can be performed using techniques well known to the skilled artisan. For example, such screens can be performed using methods such as those described in Harlow and Lane, Antibodies: A Laboratory Manual, Cold Spring Harbor Laboratory, 1988. In one illustrative example, a polypeptide may be immobilized on a solid support and contacted with patient sera to allow binding of antibodies within the sera to the immobilized polypeptide. Unbound sera may then be removed and bound antibodies detected using, for example, ¹²⁵I-labeled Protein A.

[0681] As would be recognized by the skilled artisan, immunogenic portions of the polypeptides disclosed herein are also encompassed by the present invention. An “immunogenic portion,” as used herein, is a fragment of an immunogenic polypeptide of the invention that itself is immunologically reactive (i.e., specifically binds) with the B-cells and/or T-cell surface antigen receptors that recognize the polypeptide. Immunogenic portions may generally be identified using well known techniques, such as those summarized in Paul, Fundamental Immunology, 3rd ed., 243-247 (Raven Press, 1993) and references cited therein. Such techniques include screening polypeptides for the ability to react with antigen-specific antibodies, antisera and/or T-cell lines or clones. As used herein, antisera and antibodies are “antigen-specific” if they specifically bind to an antigen (i.e., they react with the protein in an ELISA or other immunoassay, and do not react detectably with unrelated proteins). Such antisera and antibodies may be prepared as described herein, and using well-known techniques.

[0682] In one preferred embodiment, an immunogenic portion of a polypeptide of the present invention is a portion that reacts with antisera and/or T-cells at a level that is not substantially less than the reactivity of the full-length polypeptide (e.g., in an ELISA and/or T-cell reactivity assay). Preferably, the level of immunogenic activity of the immunogenic portion is at least about 50%, preferably at least about 70% and most preferably greater than about 90% of the immunogenicity for the full-length polypeptide. In some instances, preferred immunogenic portions will be identified that have a level of immunogenic activity greater than that of the corresponding full-length polypeptide, e.g., having greater than about 100% or 150% or more immunogenic activity.

[0683] In certain other embodiments, illustrative immunogenic portions may include peptides in which an N-terminal leader sequence and/or transmembrane domain has been deleted. Other illustrative immunogenic portions will contain a small N- and/or C-terminal deletion (e.g., 1-30 amino acids, preferably 5-15 amino acids), relative to the mature protein.

[0684] In another embodiment, a polypeptide composition of the invention may also comprise one or more polypeptides that are immunologically reactive with T cells and/or antibodies generated against a polypeptide of the invention, particularly a polypeptide having an amino acid sequence disclosed herein, or to an immunogenic fragment or variant thereof.

[0685] In another embodiment of the invention, polypeptides are provided that comprise one or more polypeptides that are capable of eliciting T cells and/or antibodies that are immunologically reactive with one or more polypeptides described herein, or one or more polypeptides encoded by contiguous nucleic acid sequences contained in the polynucleotide sequences disclosed herein, or immunogenic fragments or variants thereof, or to one or more nucleic acid sequences which hybridize to one or more of these sequences under conditions of moderate to high stringency.

[0686] The present invention, in another aspect, provides polypeptide fragments comprising at least about 5, 10, 15, 20, 25, 50, or 100 contiguous amino acids, or more, including all intermediate lengths, of a polypeptide composition set forth herein, such as those set forth in SEQ ID NO: 112-114, 172, 176, 178, 327, 329, 331, 336, 339, 376-380, 383, 477-483, 496, 504, 505, 519, 520, 522, 525, 527, 532, 534, 537-551, 553-568, 573-586, 588-590, 592, 706-708, 775, 776, 778, 780, 781, 811, 814, 818, 826, 827, 853, 855, 858, 860-862, 866-877, 879, 883-893, 895, 897, 898, 909-915, 920-928, 932-934, 940, 941 and 943, or those encoded by a polynucleotide sequence set forth in a sequence of SEQ ID NO: 1-111, 115-171, 173-175, 177, 179-305, 307-315, 326, 328, 330, 332-335, 340-375, 381, 382 and 384-476, 524, 526, 530, 531, 533, 535, 536, 552, 569-572, 587, 591, 593-606, 618-705, 709-774, 777, 789, 817, 823, 824, 878, 880-882, 894, 896, 907, 908, 916-919, 929-931, 938, 939 and 942.

[0687] In another aspect, the present invention provides variants of the polypeptide compositions described herein. Polypeptide variants generally encompassed by the present invention will typically exhibit at least about 70%, 75%, 80%, 85%, 90%, 91%, 92%, 93%, 94%, 95%, 96%, 97%, 98%, or 99% or more identity (determined as described below), along its length, to a polypeptide sequence set forth herein.

[0688] In one preferred embodiment, the polypeptide fragments and variants provided by the present invention are immunologically reactive with an antibody and/or T-cell that reacts with a full-length polypeptide specifically set forth herein.

[0689] In another preferred embodiment, the polypeptide fragments and variants provided by the present invention exhibit a level of immunogenic activity of at least about 50%, preferably at least about 70%, and most preferably at least about 90% or more of that exhibited by a full-length polypeptide sequence specifically set forth herein.

[0690] A polypeptide “variant,” as the term is used herein, is a polypeptide that typically differs from a polypeptide specifically disclosed herein in one or more substitutions, deletions, additions and/or insertions. Such variants may be naturally occurring or may be synthetically generated, for example, by modifying one or more of the above polypeptide sequences of the invention and evaluating their immunogenic activity as described herein using any of a number of techniques well known in the art.

[0691] For example, certain illustrative variants of the polypeptides of the invention include those in which one or more portions, such as an N-terminal leader sequence or transmembrane domain, have been removed. Other illustrative variants include variants in which a small portion (e.g., 1-30 amino acids, preferably 5-15 amino acids) has been removed from the N- and/or C-terminal of the mature protein.

[0692] In many instances, a variant will contain conservative substitutions. A “conservative substitution” is one in which an amino acid is substituted for another amino acid that has similar properties, such that one skilled in the art of peptide chemistry would expect the secondary structure and hydropathic nature of the polypeptide to be substantially unchanged. As described above, modifications may be made in the structure of the polynucleotides and polypeptides of the present invention and still obtain a functional molecule that encodes a variant or derivative polypeptide with desirable characteristics, e.g., with immunogenic characteristics. When it is desired to alter the amino acid sequence of a polypeptide to create an equivalent, or even an improved, immunogenic variant or portion of a polypeptide of the invention, one skilled in the art will typically change one or more of the codons of the encoding DNA sequence according to Table 1.

[0693] For example, certain amino acids may be substituted for other amino acids in a protein structure without appreciable loss of interactive binding capacity with structures such as, for example, antigen-binding regions of antibodies or binding sites on substrate molecules. Since it is the interactive capacity and nature of a protein that defines that protein's biological functional activity, certain amino acid sequence substitutions can be made in a protein sequence, and, of course, its underlying DNA coding sequence, and nevertheless obtain a protein with like properties. It is thus contemplated that various changes may be made in the peptide sequences of the disclosed compositions, or corresponding DNA sequences which encode said peptides without appreciable loss of their biological utility or activity.

TABLE 1

| Amino Acids | | | Codons | | | | | |
|---|---|---|---|---|---|---|---|---|
| Alanine | Ala | A | GCA | GCC | GCG | GCU | | |
| Cysteine | Cys | C | UGC | UGU | | | | |
| Aspartic acid | Asp | D | GAC | GAU | | | | |
| Glutamic acid | Glu | E | GAA | GAG | | | | |
| Phenylalanine | Phe | F | UUC | UUU | | | | |
| Glycine | Gly | G | GGA | GGC | GGG | GGU | | |
| Histidine | His | H | CAC | CAU | | | | |
| Isoleucine | Ile | I | AUA | AUC | AUU | | | |
| Lysine | Lys | K | AAA | AAG | | | | |
| Leucine | Leu | L | UUA | UUG | CUA | CUC | CUG | CUU |
| Methionine | Met | M | AUG | | | | | |
| Asparagine | Asn | N | AAC | AAU | | | | |
| Proline | Pro | P | CCA | CCC | CCG | CCU | | |
| Glutamine | Gln | Q | CAA | CAG | | | | |
| Arginine | Arg | R | AGA | AGG | CGA | CGC | CGG | CGU |
| Serine | Ser | S | AGC | AGU | UCA | UCC | UCG | UCU |
| Threonine | Thr | T | ACA | ACC | ACG | ACU | | |
| Valine | Val | V | GUA | GUC | GUG | GUU | | |
| Tryptophan | Trp | W | UGG | | | | | |
| Tyrosine | Tyr | Y | UAC | UAU | | | | |

[0694] In making such changes, the hydropathic index of amino acids may be considered. The importance of the hydropathic amino acid index in conferring interactive biologic function on a protein is generally understood in the art (Kyte and Doolittle, 1982, incorporated herein by reference). It is accepted that the relative hydropathic character of the amino acid contributes to the secondary structure of the resultant protein, which in turn defines the interaction of the protein with other molecules, for example, enzymes, substrates, receptors, DNA, antibodies, antigens, and the like. Each amino acid has been assigned a hydropathic index on the basis of its hydrophobicity and charge characteristics (Kyte and Doolittle, 1982). These values are: isoleucine (+4.5); valine (+4.2); leucine (+3.8); phenylalanine (+2.8); cysteine/cystine (+2.5); methionine (+1.9); alanine (+1.8); glycine (−0.4); threonine (−0.7); serine (−0.8); tryptophan (−0.9); tyrosine (−1.3); proline (−1.6); histidine (−3.2); glutamate (−3.5); glutamine (−3.5); aspartate (−3.5); asparagine (−3.5); lysine (−3.9); and arginine (−4.5).

[0695] It is known in the art that certain amino acids may be substituted by other amino acids having a similar hydropathic index or score and still result in a protein with similar biological activity, i.e. still obtain a biological functionally equivalent protein. In making such changes, the substitution of amino acids whose hydropathic indices are within ±2 is preferred, those within ±1 are particularly preferred, and those within ±0.5 are even more particularly preferred. It is also understood in the art that the substitution of like amino acids can be made effectively on the basis of hydrophilicity. U.S. Pat. No. 4,554,101 (specifically incorporated herein by reference in its entirety), states that the greatest local average hydrophilicity of a protein, as governed by the hydrophilicity of its adjacent amino acids, correlates with a biological property of the protein.

[0696] As detailed in U.S. Pat. No. 4,554,101, the following hydrophilicity values have been assigned to amino acid residues: arginine (+3.0); lysine (+3.0); aspartate (+3.0±1); glutamate (+3.0±1); serine (+0.3); asparagine (+0.2); glutamine (+0.2); glycine (0); threonine (−0.4); proline (−0.5±1); alanine (−0.5); histidine (−0.5); cysteine (−1.0); methionine (−1.3); valine (−1.5); leucine (−1.8); isoleucine (−1.8); tyrosine (−2.3); phenylalanine (−2.5); tryptophan (−3.4). It is understood that an amino acid can be substituted for another having a similar hydrophilicity value and still obtain a biologically equivalent, and in particular, an immunologically equivalent protein. In such changes, the substitution of amino acids whose hydrophilicity values are within ±2 is preferred, those within ±1 are particularly preferred, and those within ±0.5 are even more particularly preferred.

[0697] As outlined above, amino acid substitutions are generally therefore based on the relative similarity of the amino acid side-chain substituents, for example, their hydrophobicity, hydrophilicity, charge, size, and the like. Exemplary substitutions that take various of the foregoing characteristics into consideration are well known to those of skill in the art and include: arginine and lysine; glutamate and aspartate; serine and threonine; glutamine and asparagine; and valine, leucine and isoleucine.

[0698] In addition, any polynucleotide may be further modified to increase stability in vivo. Possible modifications include, but are not limited to, the addition of flanking sequences at the 5′ and/or 3′ ends; the use of phosphorothioate or 2′ O-methyl rather than phosphodiesterase linkages in the backbone; and/or the inclusion of nontraditional bases such as inosine, queosine and wybutosine, as well as acetyl- methyl-, thio- and other modified forms of adenine, cytidine, guanine, thymine and uridine.

[0699] Amino acid substitutions may further be made on the basis of similarity in polarity, charge, solubility, hydrophobicity, hydrophilicity and/or the amphipathic nature of the residues. For example, negatively charged amino acids include aspartic acid and glutamic acid; positively charged amino acids include lysine and arginine; and amino acids with uncharged polar head groups having similar hydrophilicity values include leucine, isoleucine and valine; glycine and alanine; asparagine and glutamine; and serine, threonine, phenylalanine and tyrosine. Other groups of amino acids that may represent conservative changes include: (1) ala, pro, gly, glu, asp, gln, asn, ser, thr; (2) cys, ser, tyr, thr; (3) val, ile, leu, met, ala, phe; (4) lys, arg, his; and (5) phe, tyr, trp, his. A variant may also, or alternatively, contain nonconservative changes. In a preferred embodiment, variant polypeptides differ from a native sequence by substitution, deletion or addition of five amino acids or fewer. Variants may also (or alternatively) be modified by, for example, the deletion or addition of amino acids that have minimal influence on the immunogenicity, secondary structure and hydropathic nature of the polypeptide.

[0700] As noted above, polypeptides may comprise a signal (or leader) sequence at the N-terminal end of the protein, which co-translationally or post-translationally directs transfer of the protein. The polypeptide may also be conjugated to a linker or other sequence for ease of synthesis, purification or identification of the polypeptide (e.g. poly-His), or to enhance binding of the polypeptide to a solid support. For example, a polypeptide may be conjugated to an immunoglobulin Fc region.

[0701] When comparing polypeptide sequences, two sequences are said to be “identical” if the sequence of amino acids in the two sequences is the same when aligned for maximum correspondence, as described below. Comparisons between two sequences are typically performed by comparing the sequences over a comparison window to identify and compare local regions of sequence similarity. A “comparison window” as used herein, refers to a segment of at least about 20 contiguous positions, usually 30 to about 75, 40 to about 50, in which a sequence may be compared to a reference sequence of the same number of contiguous positions after the two sequences are optimally aligned.

[0702] Optimal alignment of sequences for comparison may be conducted using the Megalign program in the Lasergene suite of bioinformatics software (DNASTAR, Inc., Madison, Wis.), using default parameters. This program embodies several alignment schemes described in the following references: Dayhoff, M. O. (1978) A model of evolutionary change in proteins—Matrices for detecting distant relationships. In Dayhoff, M. O. (ed.) Atlas of Protein Sequence and Structure, National Biomedical Research Foundation, Washington D.C. Vol. 5, Suppl. 3, pp. 345-358; Hein J. (1990) Unified Approach to Alignment and Phylogenes pp. 626-645 Methods in Enzymology vol. 183, Academic Press, Inc., San Diego, Calif.; Higgins, D. G. and Sharp, P. M. (1989) CABIOS 5:151-153; Myers, E. W. and Muller W. (1988) CABIOS 4:11-17; Robinson, E. D. (1971) Comb. Theor 11:105; Santou, N. Nes, M. (1987) Mol. Biol. Evol. 4:406-425; Sneath, P. H. A. and Sokal, R. R. (1973) Numerical Taxonomy—the Principles and Practice of Numerical Taxonomy, Freeman Press, San Francisco, Calif.; Wilbur, W. J. and Lipman, D. J. (1983) Proc. Natl. Acad., Sci. USA 80:726-730.

[0703] Alternatively, optimal alignment of sequences for comparison may be conducted by the local identity algorithm of Smith and Waterman (1981) Add. APL. Math 2:482, by the identity alignment algorithm of Needleman and Wunsch (1970) J. Mol. Biol. 48:443, by the search for similarity methods of Pearson and Lipman (1988) Proc. Natl. Acad. Sci. USA 85: 2444, by computerized implementations of these algorithms (GAP, BESTFIT, BLAST, FASTA, and TFASTA in the Wisconsin Genetics Software Package, Genetics Computer Group (GCG), 575 Science Dr., Madison, Wis.), or by inspection.

[0704] One preferred example of algorithms that are suitable for determining percent sequence identity and sequence similarity are the BLAST and BLAST 2.0 algorithms, which are described in Altschul et al. (1977) Nucl. Acids Res. 25:3389-3402 and Altschul et al. (1990) J. Mol. Biol. 215:403-410, respectively. BLAST and BLAST 2.0 can be used, for example with the parameters described herein, to determine percent sequence identity for the polynucleotides and polypeptides of the invention. Software for performing BLAST analyses is publicly available through the National Center for Biotechnology Information. For amino acid sequences, a scoring matrix can be used to calculate the cumulative score. Extension of the word hits in each direction are halted when: the cumulative alignment score falls off by the quantity X from its maximum achieved value; the cumulative score goes to zero or below, due to the accumulation of one or more negative-scoring residue alignments; or the end of either sequence is reached. The BLAST algorithm parameters W, T and X determine the sensitivity and speed of the alignment.

[0705] In one preferred approach, the “percentage of sequence identity” is determined by comparing two optimally aligned sequences over a window of comparison of at least 20 positions, wherein the portion of the polypeptide sequence in the comparison window may comprise additions or deletions (i.e., gaps) of 20 percent or less, usually 5 to 15 percent, or 10 to 12 percent, as compared to the reference sequences (which does not comprise additions or deletions) for optimal alignment of the two sequences. The percentage is calculated by determining the number of positions at which the identical amino acid residue occurs in both sequences to yield the number of matched positions, dividing the number of matched positions by the total number of positions in the reference sequence (i.e., the window size) and multiplying the results by 100 to yield the percentage of sequence identity.

[0706] Within other illustrative embodiments, a polypeptide may be a fusion polypeptide that comprises multiple polypeptides as described herein, or that comprises at least one polypeptide as described herein and an unrelated sequence, such as a known tumor protein. A fusion partner may, for example, assist in providing T helper epitopes (an immunological fusion partner), preferably T helper epitopes recognized by humans, or may assist in expressing the protein (an expression enhancer) at higher yields than the native recombinant protein. Certain preferred fusion partners are both immunological and expression enhancing fusion partners. Other fusion partners may be selected so as to increase the solubility of the polypeptide or to enable the polypeptide to be targeted to desired intracellular compartments. Still further fusion partners include affinity tags, which facilitate purification of the polypeptide.

[0707] Fusion polypeptides may generally be prepared using standard techniques, including chemical conjugation. Preferably, a fusion polypeptide is expressed as a recombinant polypeptide, allowing the production of increased levels, relative to a non-fused polypeptide, in an expression system. Briefly, DNA sequences encoding the polypeptide components may be assembled separately, and ligated into an appropriate expression vector. The 3′ end of the DNA sequence encoding one polypeptide component is ligated, with or without a peptide linker, to the 5′ end of a DNA sequence encoding the second polypeptide component so that the reading frames of the sequences are in phase. This permits translation into a single fusion polypeptide that retains the biological activity of both component polypeptides.

[0708] A peptide linker sequence may be employed to separate the first and second polypeptide components by a distance sufficient to ensure that each polypeptide folds into its secondary and tertiary structures. Such a peptide linker sequence is incorporated into the fusion polypeptide using standard techniques well known in the art. Suitable peptide linker sequences may be chosen based on the following factors: (1) their ability to adopt a flexible extended conformation; (2) their inability to adopt a secondary structure that could interact with functional epitopes on the first and second polypeptides; and (3) the lack of hydrophobic or charged residues that might react with the polypeptide functional epitopes. Preferred peptide linker sequences contain Gly, Asn and Ser residues. Other near neutral amino acids, such as Thr and Ala may also be used in the linker sequence. Amino acid sequences which may be usefully employed as linkers include those disclosed in Maratea et al., Gene 40:39-46, 1985; Murphy et al., Proc. Natl. Acad. Sci. USA 83:8258-8262, 1986; U.S. Pat. No. 4,935,233 and U.S. Pat. No. 4,751,180. The linker sequence may generally be from 1 to about 50 amino acids in length. Linker sequences are not required when the first and second polypeptides have non-essential N-terminal amino acid regions that can be used to separate the functional domains and prevent steric interference.

[0709] The ligated DNA sequences are operably linked to suitable transcriptional or translational regulatory elements. The regulatory elements responsible for expression of DNA are located only 5′ to the DNA sequence encoding the first polypeptides. Similarly, stop codons required to end translation and transcription termination signals are only present 3′ to the DNA sequence encoding the second polypeptide.

[0710] The fusion polypeptide can comprise a polypeptide as described herein together with an unrelated immunogenic protein, such as an immunogenic protein capable of eliciting a recall response. Examples of such proteins include tetanus, tuberculosis and hepatitis proteins (see, for example, Stoute et al. New Engl. J. Med., 336:86-91, 1997).

[0711] In one preferred embodiment, the immunological fusion partner is derived from a Mycobacterium sp., such as a Mycobacterium tuberculosis-derived Ra12 fragment. Ra12 compositions and methods for their use in enhancing the expression and/or immunogenicity of heterologous polynucleotide/polypeptide sequences is described in U.S. Pat. application Ser. No. 60/158,585, the disclosure of which is incorporated herein by reference in its entirety. Briefly, Ra12 refers to a polynucleotide region that is a subsequence of a Mycobacterium tuberculosis MTB32A nucleic acid. MTB32A is a serine protease of 32 KD molecular weight encoded by a gene in virulent and avirulent strains of M. tuberculosis. The nucleotide sequence and amino acid sequence of MTB32A have been described (for example, U.S. Pat. application Ser. No. 60/158,585; see also, Skeiky et al., Infection and Immun. (1999) 67:3998-4007, incorporated herein by reference). C-terminal fragments of the MTB32A coding sequence express at high levels and remain as a soluble polypeptides throughout the purification process. Moreover, Ra12 may enhance the immunogenicity of heterologous immunogenic polypeptides with which it is fused. One preferred Ra12 fusion polypeptide comprises a 14 KD C-terminal fragment corresponding to amino acid residues 192 to 323 of MTB32A. Other preferred Ra12 polynucleotides generally comprise at least about 15 consecutive nucleotides, at least about 30 nucleotides, at least about 60 nucleotides, at least about 100 nucleotides, at least about 200 nucleotides, or at least about 300 nucleotides that encode a portion of a Ra12 polypeptide. Ra12 polynucleotides may comprise a native sequence (i.e., an endogenous sequence that encodes a Ra12 polypeptide or a portion thereof) or may comprise a variant of such a sequence. Ra12 polynucleotide variants may contain one or more substitutions, additions, deletions and/or insertions such that the biological activity of the encoded fusion polypeptide is not substantially diminished, relative to a fusion polypeptide comprising a native Ra12 polypeptide. Variants preferably exhibit at least about 70% identity, more preferably at least about 80% identity and most preferably at least about 90% identity to a polynucleotide sequence that encodes a native Ra12 polypeptide or a portion thereof.

[0712] Within other preferred embodiments, an immunological fusion partner is derived from protein D, a surface protein of the gram-negative bacterium Haemophilus influenza B (WO 91/18926). Preferably, a protein D derivative comprises approximately the first third of the protein (e.g., the first N-terminal 100- 110 amino acids), and a protein D derivative may be lipidated. Within certain preferred embodiments, the first 109 residues of a Lipoprotein D fusion partner is included on the N-terminus to provide the polypeptide with additional exogenous T-cell epitopes and to increase the expression level in E. coli (thus functioning as an expression enhancer). The lipid tail ensures optimal presentation of the antigen to antigen presenting cells. Other fusion partners include the non-structural protein from influenzae virus, NS1 (hemaglutinin). Typically, the N-terminal 81 amino acids are used, although different fragments that include T-helper epitopes may be used.

[0713] In another embodiment, the immunological fusion partner is the protein known as LYTA, or a portion thereof (preferably a C-terminal portion). LYTA is derived from Streptococcus pneumoniae, which synthesizes an N-acetyl-L-alanine amidase known as amidase LYTA (encoded by the LytA gene; Gene 43:265-292, 1986). LYTA is an autolysin that specifically degrades certain bonds in the peptidoglycan backbone. The C-terminal domain of the LYTA protein is responsible for the affinity to the choline or to some choline analogues such as DEAE. This property has been exploited for the development of E. coli C-LYTA expressing plasmids useful for expression of fusion proteins. Purification of hybrid proteins containing the C-LYTA fragment at the amino terminus has been described (see Biotechnology 10:795-798, 1992). Within a preferred embodiment, a repeat portion of LYTA may be incorporated into a fusion polypeptide. A repeat portion is found in the C-terminal region starting at residue 178. A particularly preferred repeat portion incorporates residues 188-305.

[0714] Yet another illustrative embodiment involves fusion polypeptides, and the polynucleotides encoding them, wherein the fusion partner comprises a targeting signal capable of directing a polypeptide to the endosomal/lysosomal compartment, as described in U.S. Pat. No. 5,633,234. An immunogenic polypeptide of the invention, when fused with this targeting signal, will associate more efficiently with MHC class II molecules and Thereby provide enhanced in vivo stimulation of CD4⁺ T-cells specific for the polypeptide.

[0715] Polypeptides of the invention are prepared using any of a variety of well known synthetic and/or recombinant techniques, the latter of which are further described below. Polypeptides, portions and other variants generally less than about 150 amino acids can be generated by synthetic means, using techniques well known to those of ordinary skill in the art. In one illustrative example, such polypeptides are synthesized using any of the commercially available solid-phase techniques, such as the Merrifield solid-phase synthesis method, where amino acids are sequentially added to a growing amino acid chain. See Merrifield, J. Am. Chem. Soc. 85:2149-2146, 1963. Equipment for automated synthesis of polypeptides is commercially available from suppliers such as Perkin Elmer/Applied BioSystems Division (Foster City, Calif.), and may be operated according to the manufacturer's instructions.

[0716] In general, polypeptide compositions (including fusion polypeptides) of the invention are isolated. An “isolated” polypeptide is one that is removed from its original environment. For example, a naturally-occurring protein or polypeptide is isolated if it is separated from some or all of the coexisting materials in the natural system. Preferably, such polypeptides are also purified, e.g., are at least about 90% pure, more preferably at least about 95% pure and most preferably at least about 99% pure.

[0717] Polynucleotide Compositions

[0718] The present invention, in other aspects, provides polynucleotide compositions. The terms “DNA” and “polynucleotide” are used essentially interchangeably herein to refer to a DNA molecule that has been isolated free of total genomic DNA of a particular species. “Isolated,” as used herein, means that a polynucleotide is substantially away from other coding sequences, and that the DNA molecule does not contain large portions of unrelated coding DNA, such as large chromosomal fragments or other functional genes or polypeptide coding regions. Of course, this refers to the DNA molecule as originally isolated, and does not exclude genes or coding regions later added to the segment by the hand of man.

[0719] As will be understood by those skilled in the art, the polynucleotide compositions of this invention can include genomic sequences, extra-genomic and plasmid-encoded sequences and smaller engineered gene segments that express, or may be adapted to express, proteins, polypeptides, peptides and the like. Such segments may be naturally isolated, or modified synthetically by the hand of man.

[0720] As will be also recognized by the skilled artisan, polynucleotides of the invention may be single-stranded (coding or antisense) or double-stranded, and may be DNA (genomic, cDNA or synthetic) or RNA molecules. RNA molecules may include HNRNA molecules, which contain introns and correspond to a DNA molecule in a one-to-one manner, and mRNA molecules, which do not contain introns. Additional coding or non-coding sequences may, but need not, be present within a polynucleotide of the present invention, and a polynucleotide may, but need not, be linked to other molecules and/or support materials.

[0721] Polynucleotides may comprise a native sequence (i.e., an endogenous sequence that encodes a polypeptide/protein of the invention or a portion thereof) or may comprise a sequence that encodes a variant or derivative, preferably an immunogenic variant or derivative, of such a sequence.

[0722] Therefore, according to another aspect of the present invention, polynucleotide compositions are provided that comprise some or all of a polynucleotide sequence set forth in any one of SEQ ID NOs: 1-111, 115-171, 173-175, 177, 179-305, 307-315, 326, 328, 330, 332-335, 340-375, 381, 382 and 384-476, 524, 526, 530, 531, 533, 535, 536, 552, 569-572, 587, 591, 593-606, 618-705, 709-774, 777, 789, 817, 823, 824, 878, 880-882, 894, 896, 907, 908, 916-919, 929-931, 938, 939 and 942, complements of a polynucleotide sequence set forth in any one of SEQ ID NOs: 1-111, 115-171, 173-175, 177, 179-305, 307-315, 326, 328, 330, 332-335, 340-375, 381, 382 and 384-476, 524, 526, 530, 531, 533, 535, 536, 552, 569-572, 587, 591, 593-606, 618-705, 709-774, 777, 789, 817, 823, 824, 878, 880-882, 894, 896, 907, 908, 916-919, 929-931, 938, 939 and 942, and degenerate variants of a polynucleotide sequence set forth in any one of SEQ ID NOs: 1-111, 115-171, 173-175, 177, 179-305, 307-315, 326, 328, 330, 332-335, 340-375, 381, 382 and 384-476, 524, 526, 530, 531, 533, 535, 536, 552, 569-572, 587, 591, 593-606, 618-705, 709-774, 777, 789, 817, 823, 824, 878, 880-882, 894, 896, 907, 908, 916-919, 929-931, 938, 939 and 942. In certain preferred embodiments, the polynucleotide sequences set forth herein encode immunogenic polypeptides, as described above.

[0723] In other related embodiments, the present invention provides polynucleotide variants having substantial identity to the sequences disclosed herein in SEQ ID NOs: 1-111, 115-171, 173-175, 177, 179-305, 307-315, 326, 328, 330, 332-335, 340-375, 381, 382 and 384-476, 524, 526, 530, 531, 533, 535, 536, 552, 569-572, 587, 591, 593-606, 618-705, 709-774, 777, 789, 817, 823, 824, 878, 880-882, 894, 896, 907, 908, 916-919, 929-931, 938, 939 and 942, for example those comprising at least 70% sequence identity, preferably at least 75%, 80%, 85%, 90%, 95%, 96%, 97%, 98%, or 99% or higher, sequence identity compared to a polynucleotide sequence of this invention using the methods described herein, (e.g., BLAST analysis using standard parameters, as described below). One skilled in this art will recognize that these values can be appropriately adjusted to determine corresponding identity of proteins encoded by two nucleotide sequences by taking into account codon degeneracy, amino acid similarity, reading frame positioning and the like.

[0724] Typically, polynucleotide variants will contain one or more substitutions, additions, deletions and/or insertions, preferably such that the immunogenicity of the polypeptide encoded by the variant polynucleotide is not substantially diminished relative to a polypeptide encoded by a polynucleotide sequence specifically set forth herein). The term “variants” should also be understood to encompasses homologous genes of xenogenic origin.

[0725] In additional embodiments, the present invention provides polynucleotide fragments comprising various lengths of contiguous stretches of sequence identical to, or complementary to, one or more of the sequences disclosed herein. For example, polynucleotides are provided by this invention that comprise at least about 10, 15, 20, 30, 40, 50, 75, 100, 150, 200, 300, 400, 500 or 1000 or more contiguous nucleotides of one or more of the sequences disclosed herein as well as all intermediate lengths there between. It will be readily understood that “intermediate lengths”, in this context, means any length between the quoted values, such as 16, 17, 18, 19, etc.; 21, 22, 23, etc.; 30, 31, 32, etc.; 50, 51, 52, 53, etc.; 100, 101, 102, 103, etc.; 150, 151, 152, 153, etc.; including all integers through 200-500; 500-1,000, and the like.

[0726] In another embodiment of the invention, polynucleotide compositions are provided that are capable of hybridizing under moderate to high stringency conditions to a polynucleotide sequence provided herein, or a fragment thereof, or a complementary sequence thereof. Hybridization techniques are well known in the art of molecular biology. For purposes of illustration, suitable moderately stringent conditions for testing the hybridization of a polynucleotide of this invention with other polynucleotides include prewashing in a solution of 5×SSC, 0.5% SDS, 1.0 mM EDTA (pH 8.0); hybridizing at 50° C.-60° C., 5×SSC, overnight; followed by washing twice at 65° C. for 20 minutes with each of 2×, 0.5× and 0.2×SSC containing 0.1% SDS. One skilled in the art will understand that the stringency of hybridization can be readily manipulated, such as by altering the salt content of the hybridization solution and/or the temperature at which the hybridization is performed. For example, in another embodiment, suitable highly stringent hybridization conditions include those described above, with the exception that the temperature of hybridization is increased, e.g., to 60-65° C. or 65-70° C.

[0727] In certain preferred embodiments, the polynucleotides described above, e.g., polynucleotide variants, fragments and hybridizing sequences, encode polypeptides that are immunologically cross-reactive with a polypeptide sequence specifically set forth herein. In other preferred embodiments, such polynucleotides encode polypeptides that have a level of immunogenic activity of at least about 50%, preferably at least about 70%, and more preferably at least about 90% of that for a polypeptide sequence specifically set forth herein.

[0728] The polynucleotides of the present invention, or fragments thereof, regardless of the length of the coding sequence itself, may be combined with other DNA sequences, such as promoters, polyadenylation signals, additional restriction enzyme sites, multiple cloning sites, other coding segments, and the like, such that their overall length may vary considerably. It is therefore contemplated that a nucleic acid fragment of almost any length may be employed, with the total length preferably being limited by the ease of preparation and use in the intended recombinant DNA protocol. For example, illustrative polynucleotide segments with total lengths of about 10,000, about 5000, about 3000, about 2,000, about 1,000, about 500, about 200, about 100, about 50 base pairs in length, and the like, (including all intermediate lengths) are contemplated to be useful in many implementations of this invention.

[0729] When comparing polynucleotide sequences, two sequences are said to be “identical” if the sequence of nucleotides in the two sequences is the same when aligned for maximum correspondence, as described below. Comparisons between two sequences are typically performed by comparing the sequences over a comparison window to identify and compare local regions of sequence similarity. A “comparison window” as used herein, refers to a segment of at least about 20 contiguous positions, usually 30 to about 75, preferably 40 to about 50, in which a sequence may be compared to a reference sequence of the same number of contiguous positions after the two sequences are optimally aligned.

[0730] Optimal alignment of sequences for comparison may be conducted using the Megalign program in the Lasergene suite of bioinformatics software (DNASTAR, Inc., Madison, Wis.), using default parameters. This program embodies several alignment schemes described in the following references: Dayhoff, M. O. (1978) A model of evolutionary change in proteins—Matrices for detecting distant relationships. In Dayhoff, M. O. (ed.) Atlas of Protein Sequence and Structure, National Biomedical Research Foundation, Washington D.C. Vol. 5, Suppl. 3, pp. 345-358; Hein J. (1990) Unified Approach to Alignment and Phylogenes pp. 626-645 Methods in Enzymology vol. 183, Academic Press, Inc., San Diego, Calif.; Higgins, D. G. and Sharp, P. M. (1989) CABIOS 5:151-153; Myers, E. W. and Muller W. (1988) CABIOS 4:11-17; Robinson, E. D. (1971) Comb. Theor 11:105; Santou, N. Nes, M. (1987) Mol. Biol. Evol. 4:406-425; Sneath, P. H. A. and Sokal, R. R. (1973) Numerical Taxonomy—the Principles and Practice of Numerical Taxonomy, Freeman Press, San Francisco, Calif.; Wilbur, W. J. and Lipman, D. J. (1983) Proc. Natl. Acad., Sci. USA 80:726-730.

[0731] Alternatively, optimal alignment of sequences for comparison may be conducted by the local identity algorithm of Smith and Waterman (1981) Add. APL. Math 2:482, by the identity alignment algorithm of Needleman and Wunsch (1970) J. Mol. Biol. 48:443, by the search for similarity methods of Pearson and Lipman (1988) Proc. Natl. Acad. Sci. USA 85: 2444, by computerized implementations of these algorithms (GAP, BESTFIT, BLAST, FASTA, and TFASTA in the Wisconsin Genetics Software Package, Genetics Computer Group (GCG), 575 Science Dr., Madison, Wis.), or by inspection.

[0732] One preferred example of algorithms that are suitable for determining percent sequence identity and sequence similarity are the BLAST and BLAST 2.0 algorithms, which are described in Altschul et al. (1977) Nucl. Acids Res. 25:3389-3402 and Altschul et al. (1990) J. Mol. Biol. 215:403-410, respectively. BLAST and BLAST 2.0 can be used, for example with the parameters described herein, to determine percent sequence identity for the polynucleotides of the invention. Software for performing BLAST analyses is publicly available through the National Center for Biotechnology Information. In one illustrative example, cumulative scores can be calculated using, for nucleotide sequences, the parameters M (reward score for a pair of matching residues; always >0) and N (penalty score for mismatching residues; always <0). Extension of the word hits in each direction are halted when: the cumulative alignment score falls off by the quantity X from its maximum achieved value; the cumulative score goes to zero or below, due to the accumulation of one or more negative-scoring residue alignments; or the end of either sequence is reached. The BLAST algorithm parameters W, T and X determine the sensitivity and speed of the alignment. The BLASTN program (for nucleotide sequences) uses as defaults a wordlength (W) of 11, and expectation (E) of 10, and the BLOSUM62 scoring matrix (see Henikoff and Henikoff (1989) Proc. Natl. Acad. Sci. USA 89:10915) alignments, (B) of 50, expectation (E) of 10, M=5, N=−4 and a comparison of both strands.

[0733] Preferably, the “percentage of sequence identity” is determined by comparing two optimally aligned sequences over a window of comparison of at least 20 positions, wherein the portion of the polynucleotide sequence in the comparison window may comprise additions or deletions (i.e., gaps) of 20 percent or less, usually 5 to 15 percent, or 10 to 12 percent, as compared to the reference sequences (which does not comprise additions or deletions) for optimal alignment of the two sequences. The percentage is calculated by determining the number of positions at which the identical nucleic acid bases occurs in both sequences to yield the number of matched positions, dividing the number of matched positions by the total number of positions in the reference sequence (i.e., the window size) and multiplying the results by 100 to yield the percentage of sequence identity.

[0734] It will be appreciated by those of ordinary skill in the art that, as a result of the degeneracy of the genetic code, there are many nucleotide sequences that encode a polypeptide as described herein. Some of these polynucleotides bear minimal homology to the nucleotide sequence of any native gene. Nonetheless, polynucleotides that vary due to differences in codon usage are specifically contemplated by the present invention. Further, alleles of the genes comprising the polynucleotide sequences provided herein are within the scope of the present invention. Alleles are endogenous genes that are altered as a result of one or more mutations, such as deletions, additions and/or substitutions of nucleotides. The resulting MRNA and protein may, but need not, have an altered structure or function. Alleles may be identified using standard techniques (such as hybridization, amplification and/or database sequence comparison).

[0735] Therefore, in another embodiment of the invention, a mutagenesis approach, such as site-specific mutagenesis, is employed for the preparation of immunogenic variants and/or derivatives of the polypeptides described herein. By this approach, specific modifications in a polypeptide sequence can be made through mutagenesis of the underlying polynucleotides that encode them. These techniques provides a straightforward approach to prepare and test sequence variants, for example, incorporating one or more of the foregoing considerations, by introducing one or more nucleotide sequence changes into the polynucleotide.

[0736] Site-specific mutagenesis allows the production of mutants through the use of specific oligonucleotide sequences which encode the DNA sequence of the desired mutation, as well as a sufficient number of adjacent nucleotides, to provide a primer sequence of sufficient size and sequence complexity to form a stable duplex on both sides of the deletion junction being traversed. Mutations may be employed in a selected polynucleotide sequence to improve, alter, decrease, modify, or otherwise change the properties of the polynucleotide itself, and/or alter the properties, activity, composition, stability, or primary sequence of the encoded polypeptide.

[0737] In certain embodiments of the present invention, the inventors contemplate the mutagenesis of the disclosed polynucleotide sequences to alter one or more properties of the encoded polypeptide, such as the immunogenicity of a polypeptide vaccine. The techniques of site-specific mutagenesis are well-known in the art, and are widely used to create variants of both polypeptides and polynucleotides. For example, site-specific mutagenesis is often used to alter a specific portion of a DNA molecule. In such embodiments, a primer comprising typically about 14 to about 25 nucleotides or so in length is employed, with about 5 to about 10 residues on both sides of the junction of the sequence being altered.

[0738] As will be appreciated by those of skill in the art, site-specific mutagenesis techniques have often employed a phage vector that exists in both a single stranded and double stranded form. Typical vectors useful in site-directed mutagenesis include vectors such as the M13 phage. These phage are readily commercially-available and their use is generally well-known to those skilled in the art. Double-stranded plasmids are also routinely employed in site directed mutagenesis that eliminates the step of transferring the gene of interest from a plasmid to a phage.

[0739] In general, site-directed mutagenesis in accordance herewith is performed by first obtaining a single-stranded vector or melting apart of two strands of a double-stranded vector that includes within its sequence a DNA sequence that encodes the desired peptide. An oligonucleotide primer bearing the desired mutated sequence is prepared, generally synthetically. This primer is then annealed with the single-stranded vector, and subjected to DNA polymerizing enzymes such as E. coli polymerase I Klenow fragment, in order to complete the synthesis of the mutation-bearing strand. Thus, a heteroduplex is formed wherein one strand encodes the original non-mutated sequence and the second strand bears the desired mutation. This heteroduplex vector is then used to transform appropriate cells, such as E. coli cells, and clones are selected which include recombinant vectors bearing the mutated sequence arrangement.

[0740] The preparation of sequence variants of the selected peptide-encoding DNA segments using site-directed mutagenesis provides a means of producing potentially useful species and is not meant to be limiting as there are other ways in which sequence variants of peptides and the DNA sequences encoding them may be obtained. For example, recombinant vectors encoding the desired peptide sequence may be treated with mutagenic agents, such as hydroxylamine, to obtain sequence variants. Specific details regarding these methods and protocols are found in the teachings of Maloy et al., 1994; Segal, 1976; Prokop and Bajpai, 1991; Kuby, 1994; and Maniatis et al., 1982, each incorporated herein by reference, for that purpose.

[0741] As used herein, the term “oligonucleotide directed mutagenesis procedure” refers to template-dependent processes and vector-mediated propagation which result in an increase in the concentration of a specific nucleic acid molecule relative to its initial concentration, or in an increase in the concentration of a detectable signal, such as amplification. As used herein, the term “oligonucleotide directed mutagenesis procedure” is intended to refer to a process that involves the template-dependent extension of a primer molecule. The term template dependent process refers to nucleic acid synthesis of an RNA or a DNA molecule wherein the sequence of the newly synthesized strand of nucleic acid is dictated by the well-known rules of complementary base pairing (see, for example, Watson, 1987). Typically, vector mediated methodologies involve the introduction of the nucleic acid fragment into a DNA or RNA vector, the clonal amplification of the vector, and the recovery of the amplified nucleic acid fragment. Examples of such methodologies are provided by U.S. Pat. No. 4,237,224, specifically incorporated herein by reference in its entirety.

[0742] In another approach for the production of polypeptide variants of the present invention, recursive sequence recombination, as described in U.S. Pat. No. 5,837,458, may be employed. In this approach, iterative cycles of recombination and screening or selection are performed to “evolve” individual polynucleotide variants of the invention having, for example, enhanced immunogenic activity.

[0743] In other embodiments of the present invention, the polynucleotide sequences provided herein can be advantageously used as probes or primers for nucleic acid hybridization. As such, it is contemplated that nucleic acid segments that comprise a sequence region of at least about 15 contiguous nucleotides that has the same sequence as, or is complementary to, a 15 nucleotide long contiguous sequence disclosed herein will find particular utility. Longer contiguous identical or complementary sequences, e.g., those of about 20, 30, 40, 50, 100, 200, 500, 1000 (including all intermediate lengths) and even up to full length sequences will also be of use in certain embodiments.

[0744] The ability of such nucleic acid probes to specifically hybridize to a sequence of interest will enable them to be of use in detecting the presence of complementary sequences in a given sample. However, other uses are also envisioned, such as the use of the sequence information for the preparation of mutant species primers, or primers for use in preparing other genetic constructions.

[0745] Polynucleotide molecules having sequence regions consisting of contiguous nucleotide stretches of 10-14, 15-20, 30, 50, or even of 100-200 nucleotides or so (including intermediate lengths as well), identical or complementary to a polynucleotide sequence disclosed herein, are particularly contemplated as hybridization probes for use in, e.g., Southern and Northern blotting. This would allow a gene product, or fragment thereof, to be analyzed, both in diverse cell types and also in various bacterial cells. The total size of fragment, as well as the size of the complementary stretch(es), will ultimately depend on the intended use or application of the particular nucleic acid segment. Smaller fragments will generally find use in hybridization embodiments, wherein the length of the contiguous complementary region may be varied, such as between about 15 and about 100 nucleotides, but larger contiguous complementarity stretches may be used, according to the length complementary sequences one wishes to detect.

[0746] The use of a hybridization probe of about 15-25 nucleotides in length allows the formation of a duplex molecule that is both stable and selective. Molecules having contiguous complementary sequences over stretches greater than 15 bases in length are generally preferred, though, in order to increase stability and selectivity of the hybrid, and thereby improve the quality and degree of specific hybrid molecules obtained. One will generally prefer to design nucleic acid molecules having gene-complementary stretches of 15 to 25 contiguous nucleotides, or even longer where desired.

[0747] Hybridization probes may be selected from any portion of any of the sequences disclosed herein. All that is required is to review the sequences set forth herein, or to any continuous portion of the sequences, from about 15-25 nucleotides in length up to and including the full length sequence, that one wishes to utilize as a probe or primer. The choice of probe and primer sequences may be governed by various factors. For example, one may wish to employ primers from towards the termini of the total sequence.

[0748] Small polynucleotide segments or fragments may be readily prepared by, for example, directly synthesizing the fragment by chemical means, as is commonly practiced using an automated oligonucleotide synthesizer. Also, fragments may be obtained by application of nucleic acid reproduction technology, such as the PCRTM technology of U.S. Pat. No. 4,683,202 (incorporated herein by reference), by introducing selected sequences into recombinant vectors for recombinant production, and by other recombinant DNA techniques generally known to those of skill in the art of molecular biology.

[0749] The nucleotide sequences of the invention may be used for their ability to selectively form duplex molecules with complementary stretches of the entire gene or gene fragments of interest. Depending on the application envisioned, one will typically desire to employ varying conditions of hybridization to achieve varying degrees of selectivity of probe towards target sequence. For applications requiring high selectivity, one will typically desire to employ relatively stringent conditions to form the hybrids, e.g., one will select relatively low salt and/or high temperature conditions, such as provided by a salt concentration of from about 0.02 M to about 0.15 M salt at temperatures of from about 50° C. to about 70° C. Such selective conditions tolerate little, if any, mismatch between the probe and the template or target strand, and would be particularly suitable for isolating related sequences.

[0750] Of course, for some applications, for example, where one desires to prepare mutants employing a mutant primer strand hybridized to an underlying template, less stringent (reduced stringency) hybridization conditions will typically be needed in order to allow formation of the heteroduplex. In these circumstances, one may desire to employ salt conditions such as those of from about 0.15 M to about 0.9 M salt, at temperatures ranging from about 20° C. to about 55° C. Cross-hybridizing species can thereby be readily identified as positively hybridizing signals with respect to control hybridizations. In any case, it is generally appreciated that conditions can be rendered more stringent by the addition of increasing amounts of formamide, which serves to destabilize the hybrid duplex in the same manner as increased temperature. Thus, hybridization conditions can be readily manipulated, and thus will generally be a method of choice depending on the desired results.

[0751] According to another embodiment of the present invention, polynucleotide compositions comprising antisense oligonucleotides are provided. Antisense oligonucleotides have been demonstrated to be effective and targeted inhibitors of protein synthesis, and, consequently, provide a therapeutic approach by which a disease can be treated by inhibiting the synthesis of proteins that contribute to the disease. The efficacy of antisense oligonucleotides for inhibiting protein synthesis is well established. For example, the synthesis of polygalactauronase and the muscarine type 2 acetylcholine receptor are inhibited by antisense oligonucleotides directed to their respective mRNA sequences (U.S. Pat. No. 5,739,119 and U.S. Pat. No. 5,759,829). Further, examples of antisense inhibition have been demonstrated with the nuclear protein cyclin, the multiple drug resistance gene (MDG1), ICAM-1, E-selectin, STK-1, striatal GABA_{A} receptor and human EGF (Jaskulski et al., Science. 1988 Jun 10;240(4858):1544-6; Vasanthakumar and Ahmed, Cancer Commun. 1989;1(4):225-32; Peris et al., Brain Res Mol Brain Res. 1998 Jun 15;57(2):310-20; U.S. Pat. No. 5,801,154; U.S. Pat. No. 5,789,573; U.S. Pat. No. 5,718,709 and U.S. Pat. No. 5,610,288). Antisense constructs have also been described that inhibit and can be used to treat a variety of abnormal cellular proliferations, e.g. cancer (U.S. Pat. No. 5,747,470; U.S. Pat. No. 5,591,317 and U.S. Pat. No. 5,783,683).

[0752] Therefore, in certain embodiments, the present invention provides oligonucleotide sequences that comprise all, or a portion of, any sequence that is capable of specifically binding to polynucleotide sequence described herein, or a complement thereof. In one embodiment, the antisense oligonucleotides comprise DNA or derivatives thereof. In another embodiment, the oligonucleotides comprise RNA or derivatives thereof. In a third embodiment, the oligonucleotides are modified DNAs comprising a phosphorothioated modified backbone. In a fourth embodiment, the oligonucleotide sequences comprise peptide nucleic acids or derivatives thereof. In each case, preferred compositions comprise a sequence region that is complementary, and more preferably substantially-complementary, and even more preferably, completely complementary to one or more portions of polynucleotides disclosed herein. Selection of antisense compositions specific for a given gene sequence is based upon analysis of the chosen target sequence and determination of secondary structure, Tₘ, binding energy, and relative stability. Antisense compositions may be selected based upon their relative inability to form dimers, hairpins, or other secondary structures that would reduce or prohibit specific binding to the target MRNA in a host cell. Highly preferred target regions of the mRNA, are those which are at or near the AUG translation initiation codon, and those sequences which are substantially complementary to 5′ regions of the MRNA. These secondary structure analyses and target site selection considerations can be performed, for example, using v.4 of the OLIGO primer analysis software and/or the BLASTN 2.0.5 algorithm software (Altschul et al., Nucleic Acids Res. 1997 Sep 1;25(17):3389-402).

[0753] The use of an antisense delivery method employing a short peptide vector, termed MPG (27 residues), is also contemplated. The MPG peptide contains a hydrophobic domain derived from the fusion sequence of HIV gp41 and a hydrophilic domain from the nuclear localization sequence of SV40 T-antigen (Morris et al., Nucleic Acids Res. 1997 Jul 15;25(14):2730-6). It has been demonstrated that several molecules of the MPG peptide coat the antisense oligonucleotides and can be delivered into cultured mammalian cells in less than 1 hour with relatively high efficiency (90%). Further, the interaction with MPG strongly increases both the stability of the oligonucleotide to nuclease and the ability to cross the plasma membrane.

[0754] According to another embodiment of the invention, the polynucleotide compositions described herein are used in the design and preparation of ribozyme molecules for inhibiting expression of the tumor polypeptides and proteins of the present invention in tumor cells. Ribozymes are RNA-protein complexes that cleave nucleic acids in a site-specific fashion. Ribozymes have specific catalytic domains that possess endonuclease activity (Kim and Cech, Proc Natl Acad Sci U S A. 1987 Dec;84(24):8788-92; Forster and Symons, Cell. 1987 Apr 24;49(2):211-20). For example, a large number of nbozymes accelerate phosphoester transfer reactions with a high degree of specificity, often cleaving only one of several phosphoesters in an oligonucleotide substrate (Cech et al., Cell. 1981 Dec;27(3 Pt 2):487-96; Michel and Westhof, J Mol Biol. 1990 Dec 5;216(3):585-610; Reinhold-Hurek and Shub, Nature. 1992 May 14;357(6374):173-6). This specificity has been attributed to the requirement that the substrate bind via specific base-pairing interactions to the internal guide sequence (“IGS”) of the ribozyme prior to chemical reaction.

[0755] Six basic varieties of naturally-occurring enzymatic RNAs are known presently. Each can catalyze the hydrolysis of RNA phosphodiester bonds in trans (and thus can cleave other RNA molecules) under physiological conditions. In general, enzymatic nucleic acids act by first binding to a target RNA. Such binding occurs through the target binding portion of a enzymatic nucleic acid which is held in close proximity to an enzymatic portion of the molecule that acts to cleave the target RNA. Thus, the enzymatic nucleic acid first recognizes and then binds a target RNA through complementary base-pairing, and once bound to the correct site, acts enzymatically to cut the target RNA. Strategic cleavage of such a target RNA will destroy its ability to direct synthesis of an encoded protein. After an enzymatic nucleic acid has bound and cleaved its RNA target, it is released from that RNA to search for another target and can repeatedly bind and cleave new targets.

[0756] The enzymatic nature of a ribozyme is advantageous over many technologies, such as antisense technology (where a nucleic acid molecule simply binds to a nucleic acid target to block its translation) since the concentration of ribozyme necessary to affect a therapeutic treatment is lower than that of an antisense oligonucleotide. This advantage reflects the ability of the ribozyme to act enzymatically. Thus, a single ribozyme molecule is able to cleave many molecules of target RNA. In addition, the ribozyme is a highly specific inhibitor, with the specificity of inhibition depending not only on the base pairing mechanism of binding to the target RNA, but also on the mechanism of target RNA cleavage. Single mismatches, or base-substitutions, near the site of cleavage can completely eliminate catalytic activity of a ribozyme. Similar mismatches in antisense molecules do not prevent their action (Woolf et al., Proc Natl Acad Sci U S A. 1992 Aug 15;89(16):7305-9). Thus, the specificity of action of a ribozyme is greater than that of an antisense oligonucleotide binding the same RNA site.

[0757] The enzymatic nucleic acid molecule may be formed in a hammerhead, hairpin, a hepatitis δ virus, group I intron or RNaseP RNA (in association with an RNA guide sequence) or Neurospora VS RNA motif. Examples of hammerhead motifs are described by Rossi et al. Nucleic Acids Res. 1992 Sep 11;20(17):4559-65. Examples of hairpin motifs are described by Hampel et al. (Eur. Pat. Appl. Publ. No. EP 0360257), Hampel and Tritz, Biochemistry 1989 Jun 13;28(12):4929-33; Hampel et al., Nucleic Acids Res. 1990 Jan 25;18(2):299-304 and U.S. Pat. No. 5,631,359. An example of the hepatitis δ virus motif is described by Perrotta and Been, Biochemistry. 1992 Dec 1;31(47):11843-52; an example of the RNaseP motif is described by Guerrier-Takada et al., Cell. 1983 Dec;35(3 Pt 2):849-57; Neurospora VS RNA ribozyme motif is described by Collins (Saville and Collins, Cell. 1990 May 18;61(4):685-96; Saville and Collins, Proc Natl Acad Sci U S A. 1991 Oct 1;88(19):8826-30; Collins and Olive, Biochemistry. 1993 Mar 23;32(11):2795-9); and an example of the Group I intron is described in (U.S. Pat. No. 4,987,071). All that is important in an enzymatic nucleic acid molecule of this invention is that it has a specific substrate binding site which is complementary to one or more of the target gene RNA regions, and that it have nucleotide sequences within or surrounding that substrate binding site which impart an RNA cleaving activity to the molecule. Thus the ribozyme constructs need not be limited to specific motifs mentioned herein.

[0758] Ribozymes may be designed as described in Int. Pat. Appl. Publ. No. WO 93/23569 and Int. Pat. Appl. Publ. No. WO 94/02595, each specifically incorporated herein by reference) and synthesized to be tested in vitro and in vivo, as described. Such ribozymes can also be optimized for delivery. While specific examples are provided, those in the art will recognize that equivalent RNA targets in other species can be utilized when necessary.

[0759] Ribozyme activity can be optimized by altering the length of the ribozyme binding arms, or chemically synthesizing ribozymes with modifications that prevent their degradation by serum ribonucleases (see e.g., Int. Pat. Appl. Publ. No. WO 92/07065; Int. Pat. Appl. Publ. No. WO 93/15187; Int. Pat. Appl. Publ. No. WO 91/03162; Eur. Pat. Appl. Publ. No. 92110298.4; U.S. Pat. No. 5,334,711; and Int. Pat. Appl. Publ. No. WO 94/13688, which describe various chemical modifications that can be made to the sugar moieties of enzymatic RNA molecules), modifications which enhance their efficacy in cells, and removal of stem II bases to shorten RNA synthesis times and reduce chemical requirements.

[0760] Sullivan et al. (Int. Pat. Appl. Publ. No. WO 94/02595) describes the general methods for delivery of enzymatic RNA molecules. Ribozymes may be administered to cells by a variety of methods known to those familiar to the art, including, but not restricted to, encapsulation in liposomes, by iontophoresis, or by incorporation into other vehicles, such as hydrogels, cyclodextrins, biodegradable nanocapsules, and bioadhesive microspheres. For some indications, ribozymes may be directly delivered ex vivo to cells or tissues with or without the aforementioned vehicles. Alternatively, the RNA/vehicle combination may be locally delivered by direct inhalation, by direct injection or by use of a catheter, infusion pump or stent. Other routes of delivery include, but are not limited to, intravascular, intramuscular, subcutaneous or joint injection, aerosol inhalation, oral (tablet or pill form), topical, systemic, ocular, intraperitoneal and/or intrathecal delivery. More detailed descriptions of ribozyme delivery and administration are provided in Int. Pat. Appl. Publ. No. WO 94/02595 and Int. Pat. Appl. Publ. No. WO 93/23569, each specifically incorporated herein by reference.

[0761] Another means of accumulating high concentrations of a ribozyme(s) within cells is to incorporate the ribozyme-encoding sequences into a DNA expression vector. Transcription of the ribozyme sequences are driven from a promoter for eukaryotic RNA polymerase I (pol I), RNA polymerase II (pol II), or RNA polymerase III (pol III). Transcripts from pol II or pol III promoters will be expressed at high levels in all cells; the levels of a given pol II promoter in a given cell type will depend on the nature of the gene regulatory sequences (enhancers, silencers, etc.) present nearby. Prokaryotic RNA polymerase promoters may also be used, providing that the prokaryotic RNA polymerase enzyme is expressed in the appropriate cells Ribozymes expressed from such promoters have been shown to function in mammalian cells. Such transcription units can be incorporated into a variety of vectors for introduction into mammalian cells, including but not restricted to, plasmid DNA vectors, viral DNA vectors (such as adenovirus or adeno-associated vectors), or viral RNA vectors (such as retroviral, semliki forest virus, sindbis virus vectors).

[0762] In another embodiment of the invention, peptide nucleic acids (PNAS) compositions are provided. PNA is a DNA mimic in which the nucleobases are attached to a pseudopeptide backbone (Good and Nielsen, Antisense Nucleic Acid Drug Dev. 1997 7(4) 431-37). PNA is able to be utilized in a number methods that traditionally have used RNA or DNA. Often PNA sequences perform better in techniques than the corresponding RNA or DNA sequences and have utilities that are not inherent to RNA or DNA. A review of PNA including methods of making, characteristics of, and methods of using, is provided by Corey (Trends Biotechnol 1997 Jun; 15(6):224-9). As such, in certain embodiments, one may prepare PNA sequences that are complementary to one or more portions of the ACE mRNA sequence, and such PNA compositions may be used to regulate, alter, decrease, or reduce the translation of ACE-specific MRNA, and thereby alter the level of ACE activity in a host cell to which such PNA compositions have been administered.

[0763] PNAs have 2-aminoethyl-glycine linkages replacing the normal phosphodiester backbone of DNA (Nielsen et al., Science 1991 Dec 6;254(5037):1497-500; Hanvey et al., Science. 1992 Nov 27;258(5087):1481-5; Hyrup and Nielsen, Bioorg Med Chem. 1996 Jan;4(1):5-23). This chemistry has three important consequences: firstly, in contrast to DNA or phosphorothioate oligonucleotides, PNAs are neutral molecules; secondly, PNAs are achiral, which avoids the need to develop a stereoselective synthesis; and thirdly, PNA synthesis uses standard Boc or Fmoc protocols for solid-phase peptide synthesis, although other methods, including a modified Merrifield method, have been used.

[0764] PNA monomers or ready-made oligomers are commercially available from PerSeptive Biosystems (Framingham, Mass.). PNA syntheses by either Boc or Fmoc protocols are straightforward using manual or automated protocols (Norton et al., Bioorg Med Chem. 1995 Apr;3(4):437-45). The manual protocol lends itself to the production of chemically modified PNAs or the simultaneous synthesis of families of closely related PNAs.

[0765] As with peptide synthesis, the success of a particular PNA synthesis will depend on the properties of the chosen sequence. For example, while in theory PNAs can incorporate any combination of nucleotide bases, the presence of adjacent purines can lead to deletions of one or more residues in the product. In expectation of this difficulty, it is suggested that, in producing PNAs with adjacent purines, one should repeat the coupling of residues likely to be added inefficiently. This should be followed by the purification of PNAs by reverse-phase high-pressure liquid chromatography, providing yields and purity of product similar to those observed during the synthesis of peptides.

[0766] Modifications of PNAs for a given application may be accomplished by coupling amino acids during solid-phase synthesis or by attaching compounds that contain a carboxylic acid group to the exposed N-terminal amine. Alternatively, PNAs can be modified after synthesis by coupling to an introduced lysine or cysteine. The ease with which PNAs can be modified facilitates optimization for better solubility or for specific functional requirements. Once synthesized, the identity of PNAs and their derivatives can be confirmed by mass spectrometry. Several studies have made and utilized modifications of PNAs (for example, Norton et al., Bioorg Med Chem. 1995 Apr;3(4):437-45; Petersen et al., J Pept Sci. 1995 May-Jun;1(3):175-83; Orum et al., Biotechniques. 1995 Sep;19(3):472-80; Footer et al., Biochemistry. 1996 Aug 20;35(33):10673-9; Griffith et al., Nucleic Acids Res. 1995 Aug 11;23(15):3003-8; Pardridge et al., Proc Natl Acad Sci U S A. 1995 Jun 6;92(12):5592-6; Boffa et al., Proc Natl Acad Sci U S A. 1995 Mar 14;92(6):1901-5; Gambacorti-Passerini et al., Blood. 1996 Aug 15;88(4):1411-7; Armitage et al., Proc Natl Acad Sci U S A. 1997 Nov 1 1;94(23):12320-5; Seeger et al., Biotechniques. 1997 Sep;23(3):512-7). U.S. Pat. No. 5,700,922 discusses PNA-DNA-PNA chimeric molecules and their uses in diagnostics, modulating protein in organisms, and treatment of conditions susceptible to therapeutics.

[0767] Methods of characterizing the antisense binding properties of PNAs are discussed in Rose (Anal Chem. 1993 Dec 15;65(24):3545-9) and Jensen et al. (Biochemistry. 1997 Apr 22;36(16):5072-7). Rose uses capillary gel electrophoresis to determine binding of PNAs to their complementary oligonucleotide, measuring the relative binding kinetics and stoichiometry. Similar types of measurements were made by Jensen et al. using BIAcore™ technology.

[0768] Other applications of PNAs that have been described and will be apparent to the skilled artisan include use in DNA strand invasion, antisense inhibition, mutational analysis, enhancers of transcription, nucleic acid purification, isolation of transcriptionally active genes, blocking of transcription factor binding, genome cleavage, biosensors, in situ hybridization, and the like.

[0769] Polynucleotide Identification, Characterization and Expression

[0770] Polynucleotide compositions of the present invention may be identified, prepared and/or manipulated using any of a variety of well established techniques (see generally, Sambrook et al., Molecular Cloning: A Laboratory Manual, Cold Spring Harbor Laboratories, Cold Spring Harbor, N.Y., 1989, and other like references). For example, a polynucleotide may be identified, as described in more detail below, by screening a microarray of cDNAs for tumor-associated expression (i.e., expression that is at least two fold greater in a tumor than in normal tissue, as determined using a representative assay provided herein). Such screens may be performed, for example, using the microarray technology of Affymetrix, Inc. (Santa Clara, Calif.) according to the manufacturer's instructions (and essentially as described by Schena et al., Proc. Natl. Acad. Sci. USA 93:10614-10619, 1996 and Heller et al., Proc. Natl. Acad. Sci. USA 94:2150-2155, 1997). Alternatively, polynucleotides may be amplified from cDNA prepared from cells expressing the proteins described herein, such as tumor cells.

[0771] Many template dependent processes are available to amplify a target sequences of interest present in a sample. One of the best known amplification methods is the polymerase chain reaction (PCRTM) which is described in detail in U.S. Pat. Nos. 4,683,195, 4,683,202 and 4,800,159, each of which is incorporated herein by reference in its entirety. Briefly, in PCR™, two primer sequences are prepared which are complementary to regions on opposite complementary strands of the target sequence. An excess of deoxynucleoside triphosphates is added to a reaction mixture along with a DNA polymerase (e.g., Taq polymerase). If the target sequence is present in a sample, the primers will bind to the target and the polymerase will cause the primers to be extended along the target sequence by adding on nucleotides. By raising and lowering the temperature of the reaction mixture, the extended primers will dissociate from the target to form reaction products, excess primers will bind to the target and to the reaction product and the process is repeated. Preferably reverse transcription and PCR™ amplification procedure may be performed in order to quantify the amount of MRNA amplified. Polymerase chain reaction methodologies are well known in the art.

[0772] Any of a number of other template dependent processes, many of which are variations of the PCR™ amplification technique, are readily known and available in the art. Illustratively, some such methods include the ligase chain reaction (referred to as LCR), described, for example, in Eur. Pat. Appl. Publ. No. 320,308 and U.S. Pat. No. 4,883,750; Qbeta Replicase, described in PCT Intl. Pat. Appl. Publ. No. PCT/US87/00880; Strand Displacement Amplification (SDA) and Repair Chain Reaction (RCR). Still other amplification methods are described in Great Britain Pat. Appl. No. 2 202 328, and in PCT Intl. Pat. Appl. Publ. No. PCT/US89/01025. Other nucleic acid amplification procedures include transcription-based amplification systems (TAS) (PCT Intl. Pat. Appl. Publ. No. WO 88/10315), including nucleic acid sequence based amplification (NASBA) and 3SR. Eur. Pat. Appl. Publ. No. 329,822 describes a nucleic acid amplification process involving cyclically synthesizing single-stranded RNA (“ssRNA”), ssDNA, and double-stranded DNA (dsDNA). PCT Intl. Pat. Appl. Publ. No. WO 89/06700 describes a nucleic acid sequence amplification scheme based on the hybridization of a promoter/primer sequence to a target single-stranded DNA (“ssDNA”) followed by transcription of many RNA copies of the sequence. Other amplification methods such as “RACE” (Frohman, 1990), and “one-sided PCR” (Ohara, 1989) are also well-known to those of skill in the art.

[0773] An amplified portion of a polynucleotide of the present invention may be used to isolate a full length gene from a suitable library (e.g., a tumor cDNA library) using well known techniques. Within such techniques, a library (cDNA or genomic) is screened using one or more polynucleotide probes or primers suitable for amplification. Preferably, a library is size-selected to include larger molecules. Random primed libraries may also be preferred for identifying 5′ and upstream regions of genes. Genomic libraries are preferred for obtaining introns and extending 5′ sequences.

[0774] For hybridization techniques, a partial sequence may be labeled (e.g., by nick-translation or end-labeling with p) using well known techniques. A bacterial or bacteriophage library is then generally screened by hybridizing filters containing denatured bacterial colonies (or lawns containing phage plaques) with the labeled probe (see Sambrook et al., Molecular Cloning: A Laboratory Manual, Cold Spring Harbor Laboratories, Cold Spring Harbor, N.Y., 1989). Hybridizing colonies or plaques are selected and expanded, and the DNA is isolated for further analysis. cDNA clones may be analyzed to determine the amount of additional sequence by, for example, PCR using a primer from the partial sequence and a primer from the vector. Restriction maps and partial sequences may be generated to identify one or more overlapping clones. The complete sequence may then be determined using standard techniques, which may involve generating a series of deletion clones. The resulting overlapping sequences can then assembled into a single contiguous sequence. A full length cDNA molecule can be generated by ligating suitable fragments, using well known techniques.

[0775] Alternatively, amplification techniques, such as those described above, can be useful for obtaining a full length coding sequence from a partial cDNA sequence. One such amplification technique is inverse PCR (see Triglia et al., Nucl. Acids Res. 16:8186, 1988), which uses restriction enzymes to generate a fragment in the known region of the gene. The fragment is then circularized by intramolecular ligation and used as a template for PCR with divergent primers derived from the known region. Within an alternative approach, sequences adjacent to a partial sequence may be retrieved by amplification with a primer to a linker sequence and a primer specific to a known region. The amplified sequences are typically subjected to a second round of amplification with the same linker primer and a second primer specific to the known region. A variation on this procedure, which employs two primers that initiate extension in opposite directions from the known sequence, is described in WO 96/38591. Another such technique is known as “rapid amplification of cDNA ends” or RACE. This technique involves the use of an internal primer and an external primer, which hybridizes to a polyA region or vector sequence, to identify sequences that are 5′ and 3′ of a known sequence. Additional techniques include capture PCR (Lagerstrom et al., PCR Methods Applic. 1:1 11-19, 1991) and walking PCR (Parker et al., Nucl. Acids. Res. 19:3055-60, 1991). Other methods employing amplification may also be employed to obtain a full length cDNA sequence.

[0776] In certain instances, it is possible to obtain a full length cDNA sequence by analysis of sequences provided in an expressed sequence tag (EST) database, such as that available from GenBank. Searches for overlapping ESTs may generally be performed using well known programs (e.g., NCBI BLAST searches), and such ESTs may be used to generate a contiguous full length sequence. Full length DNA sequences may also be obtained by analysis of genomic fragments.

[0777] In other embodiments of the invention, polynucleotide sequences or fragments thereof which encode polypeptides of the invention, or fusion proteins or functional equivalents thereof, may be used in recombinant DNA molecules to direct expression of a polypeptide in appropriate host cells. Due to the inherent degeneracy of the genetic code, other DNA sequences that encode substantially the same or a functionally equivalent amino acid sequence may be produced and these sequences may be used to clone and express a given polypeptide.

[0778] As will be understood by those of skill in the art, it may be advantageous in some instances to produce polypeptide-encoding nucleotide sequences possessing non-naturally occurring codons. For example, codons preferred by a particular prokaryotic or eukaryotic host can be selected to increase the rate of protein expression or to produce a recombinant RNA transcript having desirable properties, such as a half-life which is longer than that of a transcript generated from the naturally occurring sequence.

[0779] Moreover, the polynucleotide sequences of the present invention can be engineered using methods generally known in the art in order to alter polypeptide encoding sequences for a variety of reasons, including but not limited to, alterations which modify the cloning, processing, and/or expression of the gene product. For example, DNA shuffling by random fragmentation and PCR reassembly of gene fragments and synthetic oligonucleotides may be used to engineer the nucleotide sequences. In addition, site-directed mutagenesis may be used to insert new restriction sites, alter glycosylation patterns, change codon preference, produce splice variants, or introduce mutations, and so forth.

[0780] In another embodiment of the invention, natural, modified, or recombinant nucleic acid sequences may be ligated to a heterologous sequence to encode a fusion protein. For example, to screen peptide libraries for inhibitors of polypeptide activity, it may be useful to encode a chimeric protein that can be recognized by a commercially available antibody. A fusion protein may also be engineered to contain a cleavage site located between the polypeptide-encoding sequence and the heterologous protein sequence, so that the polypeptide may be cleaved and purified away from the heterologous moiety.

[0781] Sequences encoding a desired polypeptide may be synthesized, in whole or in part, using chemical methods well known in the art (see Caruthers, M. H. et al. (1980) Nucl. Acids Res. Symp. Ser. 215-223, Horn, T. et al. (1980) Nucl. Acids Res. Symp. Ser. 225-232). Alternatively, the protein itself may be produced using chemical methods to synthesize the amino acid sequence of a polypeptide, or a portion thereof. For example, peptide synthesis can be performed using various solid-phase techniques (Roberge, J. Y. et al. (1995) Science 269:202-204) and automated synthesis may be achieved, for example, using the ABI 431A Peptide Synthesizer (Perkin Elmer, Palo Alto, Calif.).

[0782] A newly synthesized peptide may be substantially purified by preparative high performance liquid chromatography (e.g., Creighton, T. (1983) Proteins, Structures and Molecular Principles, W H Freeman and Co., New York, N.Y.) or other comparable techniques available in the art. The composition of the synthetic peptides may be confirmed by amino acid analysis or sequencing (e.g., the Edman degradation procedure). Additionally, the amino acid sequence of a polypeptide, or any part thereof, may be altered during direct synthesis and/or combined using chemical methods with sequences from other proteins, or any part thereof, to produce a variant polypeptide.

[0783] In order to express a desired polypeptide, the nucleotide sequences encoding the polypeptide, or functional equivalents, may be inserted into appropriate expression vector, i.e., a vector which contains the necessary elements for the transcription and translation of the inserted coding sequence. Methods which are well known to those skilled in the art may be used to construct expression vectors containing sequences encoding a polypeptide of interest and appropriate transcriptional and translational control elements. These methods include in vitro recombinant DNA techniques, synthetic techniques, and in vivo genetic recombination. Such techniques are described, for example, in Sambrook, J. et al. (1989) Molecular Cloning, A Laboratory Manual, Cold Spring Harbor Press, Plainview, N.Y., and Ausubel, F. M. et al. (1989) Current Protocols in Molecular Biology, John Wiley & Sons, New York. N.Y.

[0784] A variety of expression vector/host systems may be utilized to contain and express polynucleotide sequences. These include, but are not limited to, microorganisms such as bacteria transformed with recombinant bacteriophage, plasmid, or cosmid DNA expression vectors; yeast transformed with yeast expression vectors; insect cell systems infected with virus expression vectors (e.g., baculovirus); plant cell systems transformed with virus expression vectors (e.g., cauliflower mosaic virus, CaMV; tobacco mosaic virus, TMV) or with bacterial expression vectors (e.g., Ti or pBR322 plasmids); or animal cell systems.

[0785] The “control elements” or “regulatory sequences” present in an expression vector are those non-translated regions of the vector—enhancers, promoters, 5′ and 3′ untranslated regions—which interact with host cellular proteins to carry out transcription and translation. Such elements may vary in their strength and specificity. Depending on the vector system and host utilized, any number of suitable transcription and translation elements, including constitutive and inducible promoters, may be used. For example, when cloning in bacterial systems, inducible promoters such as the hybrid lacZ promoter of the PBLUESCRIPT phagemid (Stratagene, La Jolla, Calif.) or PSPORT1 plasmid (Gibco BRL, Gaithersburg, Md.) and the like may be used. In mammalian cell systems, promoters from mammalian genes or from mammalian viruses are generally preferred. If it is necessary to generate a cell line that contains multiple copies of the sequence encoding a polypeptide, vectors based on SV40 or EBV may be advantageously used with an appropriate selectable marker.

[0786] In bacterial systems, any of a number of expression vectors may be selected depending upon the use intended for the expressed polypeptide. For example, when large quantities are needed, for example for the induction of antibodies, vectors which direct high level expression of fusion proteins that are readily purified may be used. Such vectors include, but are not limited to, the multifunctional E. coli cloning and expression vectors such as BLUESCRIPT (Stratagene), in which the sequence encoding the polypeptide of interest may be ligated into the vector in frame with sequences for the amino-terminal Met and the subsequent 7 residues of .beta.-galactosidase so that a hybrid protein is produced; pIN vectors (Van Heeke, G. and S. M. Schuster (1989) J. Biol. Chem. 264:5503-5509); and the like. pGEX Vectors (Promega, Madison, Wis.) may also be used to express foreign polypeptides as fusion proteins with glutathione S-transferase (GST). In general, such fusion proteins are soluble and can easily be purified from lysed cells by adsorption to glutathione-agarose beads followed by elution in the presence of free glutathione. Proteins made in such systems may be designed to include heparin, thrombin, or factor XA protease cleavage sites so that the cloned polypeptide of interest can be released from the GST moiety at will.

[0787] In the yeast, Saccharomyces cerevisiae, a number of vectors containing constitutive or inducible promoters such as alpha factor, alcohol oxidase, and PGH may be used. For reviews, see Ausubel et al. (supra) and Grant et al. (1987) Methods Enzymol. 153:516-544.

[0788] In cases where plant expression vectors are used, the expression of sequences encoding polypeptides may be driven by any of a number of promoters. For example, viral promoters such as the 35S and 19S promoters of CaMV may be used alone or in combination with the omega leader sequence from TMV (Takamatsu, N. (1987) EMBO J. 6:307-311. Alternatively, plant promoters such as the small subunit of RUBISCO or heat shock promoters may be used (Coruzzi, G. et al. (1984) EMBO J. 3:1671-1680; Broglie, R. et al. (1984) Science 224:838-843; and Winter, J. et al. (1991) Results Probl. Cell Differ. 17:85-105). These constructs can be introduced into plant cells by direct DNA transformation or pathogen-mediated transfection. Such techniques are described in a number of generally available reviews (see, for example, Hobbs, S. or Murry, L. E. in McGraw Hill Yearbook of Science and Technology (1992) McGraw Hill, New York, N.Y.; pp. 191-196).

[0789] An insect system may also be used to express a polypeptide of interest. For example, in one such system, Autographa californica nuclear polyhedrosis virus (AcNPV) is used as a vector to express foreign genes in Spodoptera frugiperda cells or in Trichoplusia larvae. The sequences encoding the polypeptide may be cloned into a non-essential region of the virus, such as the polyhedrin gene, and placed under control of the polyhedrin promoter. Successful insertion of the polypeptide-encoding sequence will render the polyhedrin gene inactive and produce recombinant virus lacking coat protein. The recombinant viruses may then be used to infect, for example, S. frugiperda cells or Trichoplusia larvae in which the polypeptide of interest may be expressed (Engelhard, E. K. et al. (1994) Proc. Natl. Acad. Sci. 91 :3224-3227).

[0790] In mammalian host cells, a number of viral-based expression systems are generally available. For example, in cases where an adenovirus is used as an expression vector, sequences encoding a polypeptide of interest may be ligated into an adenovirus transcription/translation complex consisting of the late promoter and tripartite leader sequence. Insertion in a non-essential E1 or E3 region of the viral genome may be used to obtain a viable virus which is capable of expressing the polypeptide in infected host cells (Logan, J. and Shenk, T. (1984) Proc. Natl. Acad. Sci. 81:3655-3659). In addition, transcription enhancers, such as the Rous sarcoma virus (RSV) enhancer, may be used to increase expression in mammalian host cells.

[0791] Specific initiation signals may also be used to achieve more efficient translation of sequences encoding a polypeptide of interest. Such signals include the ATG initiation codon and adjacent sequences. In cases where sequences encoding the polypeptide, its initiation codon, and upstream sequences are inserted into the appropriate expression vector, no additional transcriptional or translational control signals may be needed. However, in cases where only coding sequence, or a portion thereof, is inserted, exogenous translational control signals including the ATG initiation codon should be provided. Furthermore, the initiation codon should be in the correct reading frame to ensure translation of the entire insert. Exogenous translational elements and initiation codons may be of various origins, both natural and synthetic. The efficiency of expression may be enhanced by the inclusion of enhancers which are appropriate for the particular cell system which is used, such as those described in the literature (Scharf, D. et al. (1994) Results Probl. Cell Differ. 20:125-162).

[0792] In addition, a host cell strain may be chosen for its ability to modulate the expression of the inserted sequences or to process the expressed protein in the desired fashion. Such modifications of the polypeptide include, but are not limited to, acetylation, carboxylation. glycosylation, phosphorylation, lipidation, and acylation. Post-translational processing which cleaves a “prepro” form of the protein may also be used to facilitate correct insertion, folding and/or function. Different host cells such as CHO, COS, HeLa, MDCK, HEK293, and WI38, which have specific cellular machinery and characteristic mechanisms for such post-translational activities, may be chosen to ensure the correct modification and processing of the foreign protein.

[0793] For long-term, high-yield production of recombinant proteins, stable expression is generally preferred. For example, cell lines which stably express a polynucleotide of interest may be transformed using expression vectors which may contain viral origins of replication and/or endogenous expression elements and a selectable marker gene on the same or on a separate vector. Following the introduction of the vector, cells may be allowed to grow for 1-2 days in an enriched media before they are switched to selective media. The purpose of the selectable marker is to confer resistance to selection, and its presence allows growth and recovery of cells which successfully express the introduced sequences. Resistant clones of stably transformed cells may be proliferated using tissue culture techniques appropriate to the cell type.

[0794] Any number of selection systems may be used to recover transformed cell lines. These include, but are not limited to, the herpes simplex virus thymidine kinase (Wigler, M. et al. (1977) Cell 11:223-32) and adenine phosphoribosyltransferase (Lowy, I. et al. (1990) Cell 22:817-23) genes which can be employed in tk.sup.- or aprt.sup.- cells, respectively. Also, antimetabolite, antibiotic or herbicide resistance can be used as the basis for selection; for example, dhfr which confers resistance to methotrexate (Wigler, M. et al. (1980) Proc. Natl. Acad. Sci. 77:3567-70); npt, which confers resistance to the aminoglycosides, neomycin and G-418 (Colbere-Garapin, F. et al (1981) J. Mol. Biol. 150:1-14); and als or pat, which confer resistance to chlorsulfuron and phosphinotricin acetyltransferase, respectively (Murry, supra). Additional selectable genes have been described, for example, trpB, which allows cells to utilize indole in place of tryptophan, or hisD, which allows cells to utilize histinol in place of histidine (Hartman, S. C. and R. C. Mulligan (1988) Proc. Natl. Acad. Sci. 85:8047-51). The use of visible markers has gained popularity with such markers as anthocyanins, beta-glucuronidase and its substrate GUS, and luciferase and its substrate luciferin, being widely used not only to identify transformants, but also to quantify the amount of transient or stable protein expression attributable to a specific vector system (Rhodes, C. A. et al. (1995) Methods Mol. Biol. 55:121-131).

[0795] Although the presence/absence of marker gene expression suggests that the gene of interest is also present, its presence and expression may need to be confirmed. For example, if the sequence encoding a polypeptide is inserted within a marker gene sequence, recombinant cells containing sequences can be identified by the absence of marker gene function. Alternatively, a marker gene can be placed in tandem with a polypeptide-encoding sequence under the control of a single promoter. Expression of the marker gene in response to induction or selection usually indicates expression of the tandem gene as well.

[0796] Alternatively, host cells that contain and express a desired polynucleotide sequence may be identified by a variety of procedures known to those of skill in the art. These procedures include, but are not limited to, DNA-DNA or DNA-RNA hybridizations and protein bioassay or immunoassay techniques which include, for example, membrane, solution, or chip based technologies for the detection and/or quantification of nucleic acid or protein.

[0797] A variety of protocols for detecting and measuring the expression of polynucleotide-encoded products, using either polyclonal or monoclonal antibodies specific for the product are known in the art. Examples include enzyme-linked immunosorbent assay (ELISA), radioimmunoassay (RIA), and fluorescence activated cell sorting (FACS). A two-site, monoclonal-based immunoassay utilizing monoclonal antibodies reactive to two non-interfering epitopes on a given polypeptide may be preferred for some applications, but a competitive binding assay may also be employed. These and other assays are described, among other places, in Hampton, R. et al. (1990; Serological Methods, a Laboratory Manual, APS Press, St Paul. Minn.) and Maddox, D. E. et al. (1983; J. Exp. Med. 158:1211-1216).

[0798] A wide variety of labels and conjugation techniques are known by those skilled in the art and may be used in various nucleic acid and amino acid assays. Means for producing labeled hybridization or PCR probes for detecting sequences related to polynucleotides include oligolabeling, nick translation, end-labeling or PCR amplification using a labeled nucleotide. Alternatively, the sequences, or any portions thereof may be cloned into a vector for the production of an MRNA probe. Such vectors are known in the art, are commercially available, and may be used to synthesize RNA probes in vitro by addition of an appropriate RNA polymerase such as T7, T3, or SP6 and labeled nucleotides. These procedures may be conducted using a variety of commercially available kits. Suitable reporter molecules or labels, which may be used include radionuclides, enzymes, fluorescent, chemiluminescent, or chromogenic agents as well as substrates, cofactors, inhibitors, magnetic particles, and the like.

[0799] Host cells transformed with a polynucleotide sequence of interest may be cultured under conditions suitable for the expression and recovery of the protein from cell culture. The protein produced by a recombinant cell may be secreted or contained intracellularly depending on the sequence and/or the vector used. As will be understood by those of skill in the art, expression vectors containing polynucleotides of the invention may be designed to contain signal sequences which direct secretion of the encoded polypeptide through a prokaryotic or eukaryotic cell membrane. Other recombinant constructions may be used to join sequences encoding a polypeptide of interest to nucleotide sequence encoding a polypeptide domain which will facilitate purification of soluble proteins. Such purification facilitating domains include, but are not limited to, metal chelating peptides such as histidine-tryptophan modules that allow purification on immobilized metals, protein A domains that allow purification on immobilized immunoglobulin, and the domain utilized in the FLAGS extension/affinity purification system (Immunex Corp., Seattle, Wash.). The inclusion of cleavable linker sequences such as those specific for Factor XA or enterokinase (Invitrogen. San Diego, Calif.) between the purification domain and the encoded polypeptide may be used to facilitate purification. One such expression vector provides for expression of a fusion protein containing a polypeptide of interest and a nucleic acid encoding 6 histidine residues preceding a thioredoxin or an enterokinase cleavage site. The histidine residues facilitate purification on IMIAC (immobilized metal ion affinity chromatography) as described in Porath, J. et al. (1992, Prot. Exp. Purif. 3:263-281) while the enterokinase cleavage site provides a means for purifying the desired polypeptide from the fusion protein. A discussion of vectors which contain fusion proteins is provided in Kroll, D. J. et al. (1993; DNA Cell Biol. 12:441-453).

[0800] In addition to recombinant production methods, polypeptides of the invention, and fragments thereof, may be produced by direct peptide synthesis using solid-phase techniques (Merrifield J. (1963) J. Am. Chem. Soc. 85:2149-2154). Protein synthesis may be performed using manual techniques or by automation. Automated synthesis may be achieved, for example, using Applied Biosystems 431A Peptide Synthesizer (Perkin Elmer). Alternatively, various fragments may be chemically synthesized separately and combined using chemical methods to produce the full length molecule.

[0801] Antibody Compositions, Fragments Thereof and Other Binding Agents

[0802] According to another aspect, the present invention further provides binding agents, such as antibodies and antigen-binding fragments thereof, that exhibit immunological binding to a tumor polypeptide disclosed herein, or to a portion, variant or derivative thereof. An antibody, or antigen-binding fragment thereof, is said to “specifically bind,” “immunogically bind,” and/or is “immunologically reactive” to a polypeptide of the invention if it reacts at a detectable level (within, for example, an ELISA assay) with the polypeptide, and does not react detectably with unrelated polypeptides under similar conditions.

[0803] Immunological binding, as used in this context, generally refers to the non-covalent interactions of the type which occur between an immunoglobulin molecule and an antigen for which the immunoglobulin is specific. The strength, or affinity of immunological binding interactions can be expressed in terms of the dissociation constant (K_{d}) of the interaction, wherein a smaller K_{d} represents a greater affinity. Immunological binding properties of selected polypeptides can be quantified using methods well known in the art. One such method entails measuring the rates of antigen-binding site/antigen complex formation and dissociation, wherein those rates depend on the concentrations of the complex partners, the affinity of the interaction, and on geometric parameters that equally influence the rate in both directions. Thus, both the “on rate constant” (Kₒₙ) and the “off rate constant” (K_{off}) can be determined by calculation of the concentrations and the actual rates of association and dissociation. The ratio of K_{off}/Kₒₙ enables cancellation of all parameters not related to affinity, and is thus equal to the dissociation constant K_{d}. See, generally, Davies et al. (1990) Annual Rev. Biochem. 59:439-473.

[0804] An “antigen-binding site,” or “binding portion” of an antibody refers to the part of the immunoglobulin molecule that participates in antigen binding. The antigen binding site is formed by amino acid residues of the N-terminal variable (“V”) regions of the heavy (“H”) and light (“L”) chains. Three highly divergent stretches within the V regions of the heavy and light chains are referred to as “hypervariable regions” which are interposed between more conserved flanking stretches known as “framework regions,” or “FRs”. Thus the term “FR” refers to amino acid sequences which are naturally found between and adjacent to hypervariable regions in immunoglobulins. In an antibody molecule, the three hypervariable regions of a light chain and the three hypervariable regions of a heavy chain are disposed relative to each other in three dimensional space to form an antigen-binding surface. The antigen-binding surface is complementary to the three-dimensional surface of a bound antigen, and the three hypervariable regions of each of the heavy and light chains are referred to as “complementarity-determining regions,” or “CDRs.”

[0805] Binding agents may be further capable of differentiating between patients with and without a cancer, such as prostate cancer, using the representative assays provided herein. For example, antibodies or other binding agents that bind to a tumor protein will preferably generate a signal indicating the presence of a cancer in at least about 20% of patients with the disease, more preferably at least about 30% of patients. Alternatively, or in addition, the antibody will generate a negative signal indicating the absence of the disease in at least about 90% of individuals without the cancer. To determine whether a binding agent satisfies this requirement, biological samples (e.g., blood, sera, sputum, urine and/or tumor biopsies) from patients with and without a cancer (as determined using standard clinical tests) may be assayed as described herein for the presence of polypeptides that bind to the binding agent. Preferably, a statistically significant number of samples with and without the disease will be assayed. Each binding agent should satisfy the above criteria; however, those of ordinary skill in the art will recognize that binding agents may be used in combination to improve sensitivity.

[0806] Any agent that satisfies the above requirements may be a binding agent. For example, a binding agent may be a ribosome, with or without a peptide component, an RNA molecule or a polypeptide. In a preferred embodiment, a binding agent is an antibody or an antigen-binding fragment thereof. Antibodies may be prepared by any of a variety of techniques known to those of ordinary skill in the art. See, e.g., Harlow and Lane, Antibodies: A Laboratory Manual, Cold Spring Harbor Laboratory, 1988. In general, antibodies can be produced by cell culture techniques, including the generation of monoclonal antibodies as described herein, or via transfection of antibody genes into suitable bacterial or mammalian cell hosts, in order to allow for the production of recombinant antibodies. In one technique, an immunogen comprising the polypeptide is initially injected into any of a wide variety of mammals (e.g., mice, rats, rabbits, sheep or goats). In this step, the polypeptides of this invention may serve as the immunogen without modification. Alternatively, particularly for relatively short polypeptides, a superior immune response may be elicited if the polypeptide is joined to a carrier protein, such as bovine serum albumin or keyhole limpet hemocyanin. The immunogen is injected into the animal host, preferably according to a predetermined schedule incorporating one or more booster immunizations, and the animals are bled periodically. Polyclonal antibodies specific for the polypeptide may then be purified from such antisera by, for example, affinity chromatography using the polypeptide coupled to a suitable solid support.

[0807] Monoclonal antibodies specific for an antigenic polypeptide of interest may be prepared, for example, using the technique of Kohler and Milstein, Eur. J. Immunol. 6:511-519, 1976, and improvements thereto. Briefly, these methods involve the preparation of immortal cell lines capable of producing antibodies having the desired specificity (i.e., reactivity with the polypeptide of interest). Such cell lines may be produced, for example, from spleen cells obtained from an animal immunized as described above. The spleen cells are then immortalized by, for example, fusion with a myeloma cell fusion partner, preferably one that is syngeneic with the immunized animal. A variety of fusion techniques may be employed. For example, the spleen cells and myeloma cells may be combined with a nonionic detergent for a few minutes and then plated at low density on a selective medium that supports the growth of hybrid cells, but not myeloma cells. A preferred selection technique uses HAT (hypoxanthine, aminopterin, thymidine) selection. After a sufficient time, usually about 1 to 2 weeks, colonies of hybrids are observed. Single colonies are selected and their culture supernatants tested for binding activity against the polypeptide. Hybridomas having high reactivity and specificity are preferred.

[0808] Monoclonal antibodies may be isolated from the supernatants of growing hybridoma colonies. In addition, various techniques may be employed to enhance the yield, such as injection of the hybridoma cell line into the peritoneal cavity of a suitable vertebrate host, such as a mouse. Monoclonal antibodies may then be harvested from the ascites fluid or the blood. Contaminants may be removed from the antibodies by conventional techniques, such as chromatography, gel filtration, precipitation, and extraction. The polypeptides of this invention may be used in the purification process in, for example, an affinity chromatography step.

[0809] A number of therapeutically useful molecules are known in the art which comprise antigen-binding sites that are capable of exhibiting immunological binding properties of an antibody molecule. The proteolytic enzyme papain preferentially cleaves IgG molecules to yield several fragments, two of which (the “F(ab)” fragments) each comprise a covalent heterodimer that includes an intact antigen-binding site. The enzyme pepsin is able to cleave IgG molecules to provide several fragments, including the “F(ab′)₂” fragment which comprises both antigen-binding sites. An “Fv” fragment can be produced by preferential proteolytic cleavage of an IgM, and on rare occasions IgG or IgA immunoglobulin molecule. Fv fragments are, however, more commonly derived using recombinant techniques known in the art. The Fv fragment includes a non-covalent V_{H}::V_{L} heterodimer including an antigen-binding site which retains much of the antigen recognition and binding capabilities of the native antibody molecule. Inbar et al. (1972) Proc. Nat. Acad. Sci. USA 69:2659-2662; Hochman et al. (1976) Biochem 15:2706-2710; and Ehrlich et al. (1980) Biochem 19:4091-4096.

[0810] A single chain Fv (“sFv”) polypeptide is a covalently linked V_{H}::V_{L} heterodimer which is expressed from a gene fusion including V_{H}- and V_{L}-encoding genes linked by a peptide-encoding linker. Huston et al. (1988) Proc. Nat. Acad. Sci. USA 85(16):5879-5883. A number of methods have been described to discern chemical structures for converting the naturally aggregated—but chemically separated—light and heavy polypeptide chains from an antibody V region into an sFv molecule which will fold into a three dimensional structure substantially similar to the structure of an antigen-binding site. See, e.g., U.S. Pat. Nos. 5,091,513 and 5,132,405, to Huston et al.; and U.S. Pat. No. 4,946,778, to Ladner et al.

[0811] Each of the above-described molecules includes a heavy chain and a light chain CDR set, respectively interposed between a heavy chain and a light chain FR set which provide support to the CDRS and define the spatial relationship of the CDRs relative to each other. As used herein, the term “CDR set” refers to the three hypervariable regions of a heavy or light chain V region. Proceeding from the N-terminus of a heavy or light chain, these regions are denoted as “CDR1,” “CDR2,” and “CDR3” respectively. An antigen-binding site, therefore, includes six CDRs, comprising the CDR set from each of a heavy and a light chain V region. A polypeptide comprising a single CDR, (e.g., a CDR1, CDR2 or CDR3) is referred to herein as a “molecular recognition unit.” Crystallographic analysis of a number of antigen-antibody complexes has demonstrated that the amino acid residues of CDRs form extensive contact with bound antigen, wherein the most extensive antigen contact is with the heavy chain CDR3. Thus, the molecular recognition units are primarily responsible for the specificity of an antigen-binding site.

[0812] As used herein, the term “FR set” refers to the four flanking amino acid sequences which frame the CDRs of a CDR set of a heavy or light chain V region. Some FR residues may contact bound antigen; however, FRs are primarily responsible for folding the V region into the antigen-binding site, particularly the FR residues directly adjacent to the CDRS. Within FRs, certain amino residues and certain structural features are very highly conserved. In this regard, all V region sequences contain an internal disulfide loop of around 90 amino acid residues. When the V regions fold into a binding-site, the CDRs are displayed as projecting loop motifs which form an antigen-binding surface. It is generally recognized that there are conserved structural regions of FRs which influence the folded shape of the CDR loops into certain “canonical” structures—regardless of the precise CDR amino acid sequence. Further, certain FR residues are known to participate in non-covalent interdomain contacts which stabilize the interaction of the antibody heavy and light chains.

[0813] A number of “humanized” antibody molecules comprising an antigen-binding site derived from a non-human immunoglobulin have been described, including chimeric antibodies having rodent V regions and their associated CDRs fused to human constant domains (Winter et al. (1991) Nature 349:293-299; Lobuglio et al. (1989) Proc. Nat. Acad. Sci. USA 86:4220-4224; Shaw et al. (1987) J Immunol. 138:4534-4538; and Brown et al. (1987) Cancer Res. 47:3577-3583), rodent CDRs grafted into a human supporting FR prior to fusion with an appropriate human antibody constant domain (Riechmann et al. (1988) Nature 332:323-327; Verhoeyen et al. (1988) Science 239:1534-1536; and Jones et al. (1986) Nature 321:522-525), and rodent CDRs supported by recombinantly veneered rodent FRs (European Patent Publication No. 519,596, published Dec. 23, 1992). These “humanized” molecules are designed to minimize unwanted immunological response toward rodent antihuman antibody molecules which limits the duration and effectiveness of therapeutic applications of those moieties in human recipients.

[0814] As used herein, the terms “veneered FRs” and “recombinantly veneered FRs” refer to the selective replacement of FR residues from, e.g., a rodent heavy or light chain V region, with human FR residues in order to provide a xenogeneic molecule comprising an antigen-binding site which retains substantially all of the native FR polypeptide folding structure. Veneering techniques are based on the understanding that the ligand binding characteristics of an antigen-binding site are determined primarily by the structure and relative disposition of the heavy and light chain CDR sets within the antigen-binding surface. Davies et al. (1990) Ann. Rev. Biochem. 59:439-473. Thus, antigen binding specificity can be preserved in a humanized antibody only wherein the CDR structures, their interaction with each other, and their interaction with the rest of the V region domains are carefully maintained. By using veneering techniques, exterior (e.g., solvent-accessible) FR residues which are readily encountered by the immune system are selectively replaced with human residues to provide a hybrid molecule that comprises either a weakly immunogenic, or substantially non-immunogenic veneered surface.

[0815] The process of veneering makes use of the available sequence data for human antibody variable domains compiled by Kabat et al., in Sequences of Proteins of Inmunological Interest, 4th ed., (U.S. Dept. of Health and Human Services, U.S. Government Printing Office, 1987), updates to the Kabat database, and other accessible U.S. and foreign databases (both nucleic acid and protein). Solvent accessibilities of V region amino acids can be deduced from the known three-dimensional structure for human and murine antibody fragments. There are two general steps in veneering a murine antigen-binding site. Initially, the FRs of the variable domains of an antibody molecule of interest are compared with corresponding FR sequences of human variable domains obtained from the above-identified sources. The most homologous human V regions are then compared residue by residue to corresponding murine amino acids. The residues in the murine FR which differ from the human counterpart are replaced by the residues present in the human moiety using recombinant techniques well known in the art. Residue switching is only carried out with moieties which are at least partially exposed (solvent accessible), and care is exercised in the replacement of amino acid residues which may have a significant effect on the tertiary structure of V region domains, such as proline, glycine and charged amino acids.

[0816] In this manner, the resultant “veneered” murine antigen-binding sites are thus designed to retain the murine CDR residues, the residues substantially adjacent to the CDRs, the residues identified as buried or mostly buried (solvent inaccessible), the residues believed to participate in non-covalent (e.g., electrostatic and hydrophobic) contacts between heavy and light chain domains, and the residues from conserved structural regions of the FRs which are believed to influence the “canonical” tertiary structures of the CDR loops. These design criteria are then used to prepare recombinant nucleotide sequences which combine the CDRs of both the heavy and light chain of a murine antigen-binding site into human-appearing FRs that can be used to transfect mammalian cells for the expression of recombinant human antibodies which exhibit the antigen specificity of the murine antibody molecule.

[0817] In another embodiment of the invention, monoclonal antibodies of the present invention may be coupled to one or more therapeutic agents. Suitable agents in this regard include radionuclides, differentiation inducers, drugs, toxins, and derivatives thereof. Preferred radionuclides include ⁹⁰Y, ¹²³I, ¹²⁵I, ¹³¹I, ¹⁸⁶Re, ¹⁸⁸Re, ²¹¹At, and ²¹²Bi. Preferred drugs include methotrexate, and pyrimidine and purine analogs. Preferred differentiation inducers include phorbol esters and butyric acid. Preferred toxins include ricin, abrin, diptheria toxin, cholera toxin, gelonin, Pseudomonas exotoxin, Shigella toxin, and pokeweed antiviral protein.

[0818] A therapeutic agent may be coupled (e.g., covalently bonded) to a suitable monoclonal antibody either directly or indirectly (e.g., via a linker group). A direct reaction between an agent and an antibody is possible when each possesses a substituent capable of reacting with the other. For example, a nucleophilic group, such as an amino or sulfhydryl group, on one may be capable of reacting with a carbonyl-containing group, such as an anhydride or an acid halide, or with an alkyl group containing a good leaving group (e.g., a halide) on the other.

[0819] Alternatively, it may be desirable to couple a therapeutic agent and an antibody via a linker group. A linker group can function as a spacer to distance an antibody from an agent in order to avoid interference with binding capabilities. A linker group can also serve to increase the chemical reactivity of a substituent on an agent or an antibody, and thus increase the coupling efficiency. An increase in chemical reactivity may also facilitate the use of agents, or functional groups on agents, which otherwise would not be possible.

[0820] It will be evident to those skilled in the art that a variety of bifunctional or polyfunctional reagents, both homo- and hetero-functional (such as those described in the catalog of the Pierce Chemical Co., Rockford, Ill.), may be employed as the linker group. Coupling may be effected, for example, through amino groups, carboxyl groups, sulfhydryl groups or oxidized carbohydrate residues. There are numerous references describing such methodology, e.g., U.S. Pat. No. 4,671,958, to Rodwell et al.

[0821] Where a therapeutic agent is more potent when free from the antibody portion of the immunoconjugates of the present invention, it may be desirable to use a linker group which is cleavable during or upon internalization into a cell. A number of different cleavable linker groups have been described. The mechanisms for the intracellular release of an agent from these linker groups include cleavage by reduction of a disulfide bond (e.g., U.S. Pat. No. 4,489,710, to Spitler), by irradiation of a photolabile bond (e.g., U.S. Pat. No. 4,625,014, to Senter et al.), by hydrolysis of derivatized amino acid side chains (e.g., U.S. Pat. No. 4,638,045, to Kohn et al.), by serum complement-mediated hydrolysis (e.g., U.S. Pat. No. 4,671,958, to Rodwell et al.), and acid-catalyzed hydrolysis (e.g., U.S. Pat. No. 4,569,789, to Blattler et al.).

[0822] It may be desirable to couple more than one agent to an antibody. In one embodiment, multiple molecules of an agent are coupled to one antibody molecule. In another embodiment, more than one type of agent may be coupled to one antibody. Regardless of the particular embodiment, immunoconjugates with more than one agent may be prepared in a variety of ways. For example, more than one agent may be coupled directly to an antibody molecule, or linkers that provide multiple sites for attachment can be used. Alternatively, a carrier can be used.

[0823] A carrier may bear the agents in a variety of ways, including covalent bonding either directly or via a linker group. Suitable carriers include proteins such as albumins (e.g., U.S. Pat. No. 4,507,234, to Kato et al.), peptides and polysaccharides such as aminodextran (e.g., U.S. Pat. No. 4,699,784, to Shih et al.). A carrier may also bear an agent by noncovalent bonding or by encapsulation, such as within a liposome vesicle (e.g., U.S. Pat. Nos. 4,429,008 and 4,873,088). Carriers specific for radionuclide agents include radiohalogenated small molecules and chelating compounds. For example, U.S. Pat. No. 4,735,792 discloses representative radiohalogenated small molecules and their synthesis. A radionuclide chelate may be formed from chelating compounds that include those containing nitrogen and sulfur atoms as the donor atoms for binding the metal, or metal oxide, radionuclide. For example, U.S. Pat. No. 4,673,562, to Davison et al. discloses representative chelating compounds and their synthesis.

[0824] T Cell Compositions

[0825] The present invention, in another aspect, provides T cells specific for a tumor polypeptide disclosed herein, or for a variant or derivative thereof. Such cells may generally be prepared in vitro or ex vivo, using standard procedures. For example, T cells may be isolated from bone marrow, peripheral blood, or a fraction of bone marrow or peripheral blood of a patient, using a commercially available cell separation system, such as the Isolex™ System, available from Nexell Therapeutics, Inc. (Irvine, Calif.; see also U.S. Pat. No. 5,240,856; U.S. Pat. No. 5,215,926; WO 89/06280; WO 91/16116 and WO 92/07243). Alternatively, T cells may be derived from related or unrelated humans, non-human mammals, cell lines or cultures.

[0826] T cells may be stimulated with a polypeptide, polynucleotide encoding a polypeptide and/or an antigen presenting cell (APC) that expresses such a polypeptide. Such stimulation is performed under conditions and for a time sufficient to permit the generation of T cells that are specific for the polypeptide of interest. Preferably, a tumor polypeptide or polynucleotide of the invention is present within a delivery vehicle, such as a microsphere, to facilitate the generation of specific T cells.

[0827] T cells are considered to be specific for a polypeptide of the present invention if the T cells specifically proliferate, secrete cytokines or kill target cells coated with the polypeptide or expressing a gene encoding the polypeptide. T cell specificity may be evaluated using any of a variety of standard techniques. For example, within a chromium release assay or proliferation assay, a stimulation index of more than two fold increase in lysis and/or proliferation, compared to negative controls, indicates T cell specificity. Such assays may be performed, for example, as described in Chen et al., Cancer Res. 54:1065-1070, 1994. Alternatively, detection of the proliferation of T cells may be accomplished by a variety of known techniques. For example, T cell proliferation can be detected by measuring an increased rate of DNA synthesis (e.g., by pulse-labeling cultures of T cells with tritiated thymidine and measuring the amount of tritiated thymidine incorporated into DNA). Contact with a tumor polypeptide (100 ng/ml-100 μg/ml, preferably 200 ng/ml-25 μg/ml) for 3-7 days will typically result in at least a two fold increase in proliferation of the T cells. Contact as described above for 2-3 hours should result in activation of the T cells, as measured using standard cytokine assays in which a two fold increase in the level of cytokine release (e.g., TNF or IFN-γ) is indicative of T cell activation (see Coligan et al., Current Protocols in Immunology, vol. 1, Wiley Interscience (Greene 1998)). T cells that have been activated in response to a tumor polypeptide, polynucleotide or polypeptide-expressing APC may be CD4⁺and/or CD8⁺. Tumor polypeptide-specific T cells may be expanded using standard techniques. Within preferred embodiments, the T cells are derived from a patient, a related donor or an unrelated donor, and are administered to the patient following stimulation and expansion.

[0828] For therapeutic purposes, CD4⁺or CD8⁺T cells that proliferate in response to a tumor polypeptide, polynucleotide or APC can be expanded in number either in vitro or in vivo. Proliferation of such T cells in vitro may be accomplished in a variety of ways. For example, the T cells can be re-exposed to a tumor polypeptide, or a short peptide corresponding to an immunogenic portion of such a polypeptide, with or without the addition of T cell growth factors, such as interleukin-2, and/or stimulator cells that synthesize a tumor polypeptide. Alternatively, one or more T cells that proliferate in the presence of the tumor polypeptide can be expanded in number by cloning. Methods for cloning cells are well known in the art, and include limiting dilution.

[0829] Pharmaceutical Compositions

[0830] In additional embodiments, the present invention concerns formulation of one or more of the polynucleotide, polypeptide, T-cell and/or antibody compositions disclosed herein in pharmaceutically-acceptable carriers for administration to a cell or an animal, either alone, or in combination with one or more other modalities of therapy.

[0831] It will be understood that, if desired, a composition as disclosed herein may be administered in combination with other agents as well, such as, e.g., other proteins or polypeptides or various pharmaceutically-active agents. In fact, there is virtually no limit to other components that may also be included, given that the additional agents do not cause a significant adverse effect upon contact with the target cells or host tissues. The compositions may thus be delivered along with various other agents as required in the particular instance. Such compositions may be purified from host cells or other biological sources, or alternatively may be chemically synthesized as described herein. Likewise, such compositions may further comprise substituted or derivatized RNA or DNA compositions.

[0832] Therefore, in another aspect of the present invention, pharmaceutical compositions are provided comprising one or more of the polynucleotide, polypeptide, antibody, and/or T-cell compositions described herein in combination with a physiologically acceptable carrier. In certain preferred embodiments, the pharmaceutical compositions of the invention comprise immunogenic polynucleotide and/or polypeptide compositions of the invention for use in prophylactic and theraputic vaccine applications. Vaccine preparation is generally described in, for example, M. F. Powell and M. J. Newman, eds., “Vaccine Design (the subunit and adjuvant approach),” Plenum Press (NY, 1995). Generally, such compositions will comprise one or more polynucleotide and/or polypeptide compositions of the present invention in combination with one or more immunostimulants.

[0833] It will be apparent that any of the pharmaceutical compositions described herein can contain pharmaceutically acceptable salts of the polynucleotides and polypeptides of the invention. Such salts can be prepared, for example, from pharmaceutically acceptable non-toxic bases, including organic bases (e.g., salts of primary, secondary and tertiary amines and basic amino acids) and inorganic bases (e.g., sodium, potassium, lithium, ammonium, calcium and magnesium salts).

[0834] In another embodiment, illustrative immunogenic compositions, e.g., vaccine compositions, of the present invention comprise DNA encoding one or more of the polypeptides as described above, such that the polypeptide is generated in situ. As noted above, the polynucleotide may be administered within any of a variety of delivery systems known to those of ordinary skill in the art. Indeed, numerous gene delivery techniques are well known in the art, such as those described by Rolland, Crit. Rev. Therap. Drug Carrier Systems 15:143-198, 1998, and references cited therein. Appropriate polynucleotide expression systems will, of course, contain the necessary regulatory DNA regulatory sequences for expression in a patient (such as a suitable promoter and terminating signal). Alternatively, bacterial delivery systems may involve the administration of a bacterium (such as Bacillus-Calmette-Guerrin) that expresses an immunogenic portion of the polypeptide on its cell surface or secretes such an epitope.

[0835] Therefore, in certain embodiments, polynucleotides encoding immunogenic polypeptides described herein are introduced into suitable mammalian host cells for expression using any of a number of known viral-based systems. In one illustrative embodiment, retroviruses provide a convenient and effective platform for gene delivery systems. A selected nucleotide sequence encoding a polypeptide of the present invention can be inserted into a vector and packaged in retroviral particles using techniques known in the art. The recombinant virus can then be isolated and delivered to a subject. A number of illustrative retroviral systems have been described (e.g., U.S. Pat. No. 5,219,740; Miller and Rosman (1989) BioTechniques 7:980-990; Miller, A. D. (1990) Human Gene Therapy 1:5-14; Scarpa et al. (1991) Virology 180:849-852; Burns et al. (1993) Proc. Natl. Acad. Sci. USA 90:8033-8037; and Boris-Lawrie and Temin (1993) Cur. Opin. Genet. Develop. 3:102-109.

[0836] In addition, a number of illustrative adenovirus-based systems have also been described. Unlike retroviruses which integrate into the host genome, adenoviruses persist extrachromosomally thus minimizing the risks associated with insertional mutagenesis (Haj-Ahmad and Graham (1986) J. Virol. 57:267-274; Bett et al. (1993) J. Virol. 67:5911-5921; Mittereder et al. (1994) Human Gene Therapy 5:717-729; Seth et al. (1994) J. Virol. 68:933-940; Barr et al. (1994) Gene Therapy 1:51-58; Berkner, K. L. (1988) BioTechniques 6:616-629; and Rich et al. (1993) Human Gene Therapy 4:461-476).

[0837] Various adeno-associated virus (AAV) vector systems have also been developed for polynucleotide delivery. AAV vectors can be readily constructed using techniques well known in the art. See, e.g., U.S. Pat. Nos. 5,173,414 and 5,139,941; International Publication Nos. WO 92/01070 and WO 93/03769; Lebkowski et al. (1988) Molec. Cell. Biol. 8:3988-3996; Vincent et al. (1990) Vaccines 90 (Cold Spring Harbor Laboratory Press); Carter, B. J. (1992) Current Opinion in Biotechnology 3:533-539; Muzyczka, N. (1992) Current Topics in Microbiol. and Immunol. 158:97-129; Kotin, R. M. (1994) Human Gene Therapy 5:793-801; Shelling and Smith (1994) Gene Therapy 1:165-169; and Zhou et al. (1994) J. Exp. Med. 179:1867-1875.

[0838] Additional viral vectors useful for delivering the polynucleotides encoding polypeptides of the present invention by gene transfer include those derived from the pox family of viruses, such as vaccinia virus and avian poxvirus. By way of example, vaccinia virus recombinants expressing the novel molecules can be constructed as follows. The DNA encoding a polypeptide is first inserted into an appropriate vector so that it is adjacent to a vaccinia promoter and flanking vaccinia DNA sequences, such as the sequence encoding thymidine kinase (TK). This vector is then used to transfect cells which are simultaneously infected with vaccinia. Homologous recombination serves to insert the vaccinia promoter plus the gene encoding the polypeptide of interest into the viral genome. The resulting TK.sup.(-) recombinant can be selected by culturing the cells in the presence of 5-bromodeoxyunridine and picking viral plaques resistant thereto.

[0839] A vaccinia-based infection/transfection system can be conveniently used to provide for inducible, transient expression or coexpression of one or more polypeptides described herein in host cells of an organism. In this particular system, cells are first infected in vitro with a vaccinia virus recombinant that encodes the bacteriophage T7 RNA polymerase. This polymerase displays exquisite specificity in that it only transcribes templates bearing T7 promoters. Following infection, cells are transfected with the polynucleotide or polynucleotides of interest, driven by a T7 promoter. The polymerase expressed in the cytoplasm from the vaccinia virus recombinant transcribes the transfected DNA into RNA which is then translated into polypeptide by the host translational machinery. The method provides for high level, transient, cytoplasmic production of large quantities of RNA and its translation products. See, e.g., Elroy-Stein and Moss, Proc. Natl. Acad. Sci. USA (1990) 87:6743-6747; Fuerst et al. Proc. Natl. Acad. Sci. USA (1986) 83:8122-8126.

[0840] Alternatively, avipoxviruses, such as the fowlpox and canarypox viruses, can also be used to deliver the coding sequences of interest. Recombinant avipox viruses, expressing immunogens from mammalian pathogens, are known to confer protective immunity when administered to non-avian species. The use of an Avipox vector is particularly desirable in human and other mammalian species since members of the Avipox genus can only productively replicate in susceptible avian species and therefore are not infective in mammalian cells. Methods for producing recombinant Avipoxviruses are known in the art and employ genetic recombination, as described above with respect to the production of vaccinia viruses. See, e.g., WO 91/12882; WO 89/03429; and WO 92/03545.

[0841] Any of a number of alphavirus vectors can also be used for delivery of polynucleotide compositions of the present invention, such as those vectors described in U.S. Pat. Nos. 5,843,723; 6,015,686; 6,008,035 and 6,015,694. Certain vectors based on Venezuelan Equine Encephalitis (VEE) can also be used, illustrative examples of which can be found in U.S. Pat. Nos. 5,505,947 and 5,643,576.

[0842] Moreover, molecular conjugate vectors, such as the adenovirus chimeric vectors described in Michael et al. J. Biol. Chem. (1993) 268:6866-6869 and Wagner et al. Proc. Natl. Acad. Sci. USA (1992) 89:6099-6103, can also be used for gene delivery under the invention.

[0843] Additional illustrative information on these and other known viral-based delivery systems can be found, for example, in Fisher-Hoch et al., Proc. Natl. Acad. Sci. USA 86:317-321, 1989; Flexner et al., Ann. N.Y Acad. Sci. 569:86-103, 1989; Flexner et al., Vaccine 8:17-21, 1990; U.S. Pat. Nos. 4,603,112, 4,769,330, and 5,017,487; WO 89/01973; U.S. Pat. No. 4,777,127; GB 2,200,651; EP 0,345,242; WO 91/02805; Berkner, Biotechniques 6:616-627, 1988; Rosenfeld et al., Science 252:431-434, 1991; Kolls et al., Proc. Natl. Acad. Sci. USA 91:215-219, 1994; Kass-Eisler et al., Proc. Natl. Acad. Sci. USA 90:11498-11502, 1993; Guzman et al., Circulation 88:2838-2848, 1993; and Guzman et al., Cir. Res. 73:1202-1207, 1993.

[0844] In certain embodiments, a polynucleotide may be integrated into the genome of a target cell. This integration may be in a specific location and orientation via homologous recombination (gene replacement) or it may be integrated in a random, non-specific location (gene augmentation). In yet further embodiments, the polynucleotide may be stably maintained in the cell as a separate, episomal segment of DNA. Such polynucleotide segments or “episomes” encode sequences sufficient to permit maintenance and replication independent of or in synchronization with the host cell cycle. The manner in which the expression construct is delivered to a cell and where in the cell the polynucleotide remains is dependent on the type of expression construct employed.

[0845] In another embodiment of the invention, a polynucleotide is administered/delivered as “naked” DNA, for example as described in Ulmer et al., Science 259:1745-1749, 1993 and reviewed by Cohen, Science 259:1691-1692, 1993. The uptake of naked DNA may be increased by coating the DNA onto biodegradable beads, which are efficiently transported into the cells.

[0846] In still another embodiment, a composition of the present invention can be delivered via a particle bombardment approach, many of which have been described. In one illustrative example, gas-driven particle acceleration can be achieved with devices such as those manufactured by Powderject Pharmaceuticals PLC (Oxford, UK) and Powderject Vaccines Inc. (Madison, Wis.), some examples of which are described in U.S. Pat. Nos. 5,846,796; 6,010,478; 5,865,796; 5,584,807; and EP Patent No. 0500 799. This approach offers a needle-free delivery approach wherein a dry powder formulation of microscopic particles, such as polynucleotide or polypeptide particles, are accelerated to high speed within a helium gas jet generated by a hand held device, propelling the particles into a target tissue of interest.

[0847] In a related embodiment, other devices and methods that may be useful for gas-driven needle-less injection of compositions of the present invention include those provided by Bioject, Inc. (Portland, Oreg.), some examples of which are described in U.S. Pat. Nos. 4,790,824; 5,064,413; 5,312,335; 5,383,851; 5,399,163; 5,520,639 and 5,993,412.

[0848] According to another embodiment, the pharmaceutical compositions described herein will comprise one or more immunostimulants in addition to the immunogenic polynucleotide, polypeptide, antibody, T-cell and/or APC compositions of this invention. An immunostimulant refers to essentially any substance that enhances or potentiates an immune response (antibody and/or cell-mediated) to an exogenous antigen. One preferred type of immunostimulant comprises an adjuvant. Many adjuvants contain a substance designed to protect the antigen from rapid catabolism, such as aluminum hydroxide or mineral oil, and a stimulator of immune responses, such as lipid A, Bortadella pertussis or Mycobacterium tuberculosis derived proteins. Certain adjuvants are commercially available as, for example, Freund's Incomplete Adjuvant and Complete Adjuvant (Difco Laboratories, Detroit, Mich.); Merck Adjuvant 65 (Merck and Company, Inc., Rahway, N.J.); AS-2 (SmithKline Beecham, Philadelphia, Pa.); aluminum salts such as aluminum hydroxide gel (alum) or aluminum phosphate; salts of calcium, iron or zinc; an insoluble suspension of acylated tyrosine; acylated sugars; cationically or anionically derivatized polysaccharides; polyphosphazenes; biodegradable microspheres; monophosphoryl lipid A and quil A. Cytokines, such as GM-CSF, interleukin-2, -7, -12, and other like growth factors, may also be used as adjuvants.

[0849] Within certain embodiments of the invention, the adjuvant composition is preferably one that induces an immune response predominantly of the Th1 type. High levels of Th1-type cytokines (e.g., IFN-γ, TNFα, IL-2 and IL-12) tend to favor the induction of cell mediated immune responses to an administered antigen. In contrast, high levels of Th2-type cytokines (e.g., IL-4, IL-5, IL-6 and IL-10) tend to favor the induction of humoral immune responses. Following application of a vaccine as provided herein, a patient will support an immune response that includes Th1- and Th2-type responses. Within a preferred embodiment, in which a response is predominantly Th1-type, the level of Th1-type cytokines will increase to a greater extent than the level of Th2-type cytokines. The levels of these cytokines may be readily assessed using standard assays. For a review of the families of cytokines, see Mosmann and Coffman, Ann. Rev. Immunol. 7:145-173, 1989.

[0850] Certain preferred adjuvants for eliciting a predominantly Th1-type response include, for example, a combination of monophosphoryl lipid A, preferably 3-de-O-acylated monophosphoryl lipid A, together with an aluminum salt. MPL adjuvants are available from Corixa Corporation (Seattle, Wash.; see, for example, U.S. Pat. Nos. 4,436,727; 4,877,611; 4,866,034 and 4,912,094). CpG-containing oligonucleotides (in which the CpG dinucleotide is unmethylated) also induce a predominantly Th1 response. Such oligonucleotides are well known and are described, for example, in WO 96/02555, WO 99/33488 and U.S. Pat. Nos. 6,008,200 and 5,856,462. Immunostimulatory DNA sequences are also described, for example, by Sato et al., Science 273:352, 1996. Another preferred adjuvant comprises a saponin, such as Quil A, or derivatives thereof, including QS21 and QS7 (Aquila Biopharmaceuticals Inc., Framingham, Mass.); Escin; Digitonin; or Gypsophila or Chenopodium quinoa saponins. Other preferred formulations include more than one saponin in the adjuvant combinations of the present invention, for example combinations of at least two of the following group comprising QS21, QS7, Quil A, β-escin, or digitonin.

[0851] Alternatively the saponin formulations may be combined with vaccine vehicles composed of chitosan or other polycationic polymers, polylactide and polylactide-co-glycolide particles, poly-N-acetyl glucosamine-based polymer matrix, particles composed of polysaccharides or chemically modified polysaccharides, liposomes and lipid-based particles, particles composed of glycerol monoesters, etc. The saponins may also be formulated in the presence of cholesterol to form particulate structures such as liposomes or ISCOMs. Furthermore, the saponins may be formulated together with a polyoxyethylene ether or ester, in either a non-particulate solution or suspension, or in a particulate structure such as a paucilamelar liposome or ISCOM. The saponins may also be formulated with excipients such as Carbopol® to increase viscosity, or may be formulated in a dry powder form with a powder excipient such as lactose.

[0852] In one preferred embodiment, the adjuvant system includes the combination of a monophosphoryl lipid A and a saponin derivative, such as the combination of QS21 and 3D-MPL® adjuvant, as described in WO 94/00153, or a less reactogenic composition where the QS21 is quenched with cholesterol, as described in WO 96/33739. Other preferred formulations comprise an oil-in-water emulsion and tocopherol. Another particularly preferred adjuvant formulation employing QS21, 3D-MPL® adjuvant and tocopherol in an oil-in-water emulsion is described in WO 95/17210.

[0853] Another enhanced adjuvant system involves the combination of a CpG-containing oligonucleotide and a saponin derivative particularly the combination of CpG and QS21 is disclosed in WO 00/09159. Preferably the formulation additionally comprises an oil in water emulsion and tocopherol.

[0854] Additional illustrative adjuvants for use in the pharmaceutical compositions of the invention include Montanide ISA 720 (Seppic, France), SAF (Chiron, Calif., United States), ISCOMS (CSL), MF-59 (Chiron), the SBAS series of adjuvants (e.g., SBAS-2 or SBAS-4, available from SmithKline Beecham, Rixensart, Belgium), Detox (Enhanzyn®; Corixa, Hamilton, Mont.), RC-529 (Corixa, Hamilton, Mont.) and other aminoalkyl glucosaminide 4-phosphates (AGPs), such as those described in pending U.S. Pat. application Ser. Nos. 08/853,826 and 09/074,720, the disclosures of which are incorporated herein by reference in their entireties, and polyoxyethylene ether adjuvants such as those described in WO 99/52549A1.

[0855] Other preferred adjuvants include adjuvant molecules of the general formula

HO(CH₂CH₂O)ₙ—A—R, (I)

[0856] wherein, n is 1-50, A is a bond or —C(O)—, R is C₁₋₅₀ alkyl or Phenyl C₁₋₅₀ alkyl.

[0857] One embodiment of the present invention consists of a vaccine formulation comprising a polyoxyethylene ether of general formula (I), wherein n is between 1 and 50, preferably 4-24, most preferably 9; the R component is C_{1-50,} preferably C₄—C₂₀ alkyl and most preferably C₁₂ alkyl, and A is a bond. The concentration of the polyoxyethylene ethers should be in the range 0.1-20%, preferably from 0.1-10%, and most preferably in the range 0.1-1%. Preferred polyoxyethylene ethers are selected from the following group: polyoxyethylene-9-lauryl ether, polyoxyethylene-9-steoryl ether, polyoxyethylene-8-steoryl ether, polyoxyethylene-4-lauryl ether, polyoxyethylene-35-lauryl ether, and polyoxyethylene-23-lauryl ether. Polyoxyethylene ethers such as polyoxyethylene lauryl ether are described in the Merck index (12^{th} edition: entry 7717). These adjuvant molecules are described in WO 99/52549. The polyoxyethylene ether according to the general formula (1) above may, if desired, be combined with another adjuvant. For example, a preferred adjuvant combination is preferably with CpG as described in the pending UK patent application GB 9820956.2.

[0858] According to another embodiment of this invention, an immunogenic composition described herein is delivered to a host via antigen presenting cells (APCs), such as dendritic cells, macrophages, B cells, monocytes and other cells that may be engineered to be efficient APCs. Such cells may, but need not, be genetically modified to increase the capacity for presenting the antigen, to improve activation and/or maintenance of the T cell response, to have anti-tumor effects per se and/or to be immunologically compatible with the receiver (i.e., matched HLA haplotype). APCs may generally be isolated from any of a variety of biological fluids and organs, including tumor and peritumoral tissues, and may be autologous, allogeneic, syngeneic or xenogeneic cells.

[0859] Certain preferred embodiments of the present invention use dendritic cells or progenitors thereof as antigen-presenting cells. Dendritic cells are highly potent APCs (Banchereau and Steinman, Nature 392:245-251, 1998) and have been shown to be effective as a physiological adjuvant for eliciting prophylactic or therapeutic antitumor immunity (see Timmerman and Levy, Ann. Rev. Med. 50:507-529, 1999). In general, dendritic cells may be identified based on their typical shape (stellate in situ, with marked cytoplasmic processes (dendrites) visible in vitro), their ability to take up, process and present antigens with high efficiency and their ability to activate naïve T cell responses. Dendritic cells may, of course, be engineered to express specific cell-surface receptors or ligands that are not commonly found on dendritic cells in vivo or ex vivo, and such modified dendritic cells are contemplated by the present invention. As an alternative to dendritic cells, secreted vesicles antigen-loaded dendritic cells (called exosomes) may be used within a vaccine (see Zitvogel et al., Nature Med. 4:594-600, 1998).

[0860] Dendritic cells and progenitors may be obtained from peripheral blood, bone marrow, tumor-infiltrating cells, peritumoral tissues-infiltrating cells, lymph nodes, spleen, skin, umbilical cord blood or any other suitable tissue or fluid. For example, dendritic cells may be differentiated ex vivo by adding a combination of cytokines such as GM-CSF, IL-4, IL-13 and/or TNFα to cultures of monocytes harvested from peripheral blood. Alternatively, CD34 positive cells harvested from peripheral blood, umbilical cord blood or bone marrow may be differentiated into dendritic cells by adding to the culture medium combinations of GM-CSF, IL-3, TNFα, CD40 ligand, LPS, flt3 ligand and/or other compound(s) that induce differentiation, maturation and proliferation of dendritic cells.

[0861] Dendritic cells are conveniently categorized as “immature” and “mature” cells, which allows a simple way to discriminate between two well characterized phenotypes. However, this nomenclature should not be construed to exclude all possible intermediate stages of differentiation. Immature dendritic cells are characterized as APC with a high capacity for antigen uptake and processing, which correlates with the high expression of Fcy receptor and mannose receptor. The mature phenotype is typically characterized by a lower expression of these markers, but a high expression of cell surface molecules responsible for T cell activation such as class I and class II MHC, adhesion molecules (e.g., CD54 and CD11) and costimulatory molecules (e.g., CD40, CD80, CD86 and 4-1BB).

[0862] APCs may generally be transfected with a polynucleotide of the invention (or portion or other variant thereof) such that the encoded polypeptide, or an immunogenic portion thereof, is expressed on the cell surface. Such transfection may take place ex vivo, and a pharmaceutical composition comprising such transfected cells may then be used for therapeutic purposes, as described herein. Alternatively, a gene delivery vehicle that targets a dendritic or other antigen presenting cell may be administered to a patient, resulting in transfection that occurs in vivo. In vivo and ex vivo transfection of dendritic cells, for example, may generally be performed using any methods known in the art, such as those described in WO 97/24447, or the gene gun approach described by Mahvi et al., Immunology and cell Biology 75:456-460, 1997. Antigen loading of dendritic cells may be achieved by incubating dendritic cells or progenitor cells with the tumor polypeptide, DNA (naked or within a plasmid vector) or RNA; or with antigen-expressing recombinant bacterium or viruses (e.g., vaccinia, fowlpox, adenovirus or lentivirus vectors). Prior to loading, the polypeptide may be covalently conjugated to an immunological partner that provides T cell help (e.g., a carrier molecule). Alternatively, a dendritic cell may be pulsed with a non-conjugated immunological partner, separately or in the presence of the polypeptide.

[0863] While any suitable carrier known to those of ordinary skill in the art may be employed in the pharmaceutical compositions of this invention, the type of carrier will typically vary depending on the mode of administration. Compositions of the present invention may be formulated for any appropriate manner of administration, including for example, topical, oral, nasal, mucosal, intravenous, intracranial, intraperitoneal, subcutaneous and intramuscular administration.

[0864] Carriers for use within such pharmaceutical compositions are biocompatible, and may also be biodegradable. In certain embodiments, the formulation preferably provides a relatively constant level of active component release. In other embodiments, however, a more rapid rate of release immediately upon administration may be desired. The formulation of such compositions is well within the level of ordinary skill in the art using known techniques. Illustrative carriers useful in this regard include microparticles of poly(lactide-co-glycolide), polyacrylate, latex, starch, cellulose, dextran and the like. Other illustrative delayed-release carriers include supramolecular biovectors, which comprise a non-liquid hydrophilic core (e.g., a cross-linked polysaccharide or oligosaccharide) and, optionally, an external layer comprising an amphiphilic compound, such as a phospholipid (see e.g., U.S. Pat. No. 5,151,254 and PCT applications WO 94/20078, WO/94/23701 and WO 96/06638). The amount of active compound contained within a sustained release formulation depends upon the site of implantation, the rate and expected duration of release and the nature of the condition to be treated or prevented.

[0865] In another illustrative embodiment, biodegradable microspheres (e.g., polylactate polyglycolate) are employed as carriers for the compositions of this invention. Suitable biodegradable microspheres are disclosed, for example, in U.S. Pat. Nos. 4,897,268; 5,075,109; 5,928,647; 5,811,128; 5,820,883; 5,853,763; 5,814,344, 5,407,609 and 5,942,252. Modified hepatitis B core protein carrier systems. such as described in WO/99 40934, and references cited therein, will also be useful for many applications. Another illustrative carrier/delivery system employs a carrier comprising particulate-protein complexes, such as those described in U.S. Pat. No. 5,928,647, which are capable of inducing a class I-restricted cytotoxic T lymphocyte responses in a host.

[0866] The pharmaceutical compositions of the invention will often further comprise one or more buffers (e.g., neutral buffered saline or phosphate buffered saline), carbohydrates (e.g., glucose, mannose, sucrose or dextrans), mannitol, proteins, polypeptides or amino acids such as glycine, antioxidants, bacteriostats, chelating agents such as EDTA or glutathione, adjuvants (e.g., aluminum hydroxide), solutes that render the formulation isotonic, hypotonic or weakly hypertonic with the blood of a recipient, suspending agents, thickening agents and/or preservatives. Alternatively, compositions of the present invention may be formulated as a lyophilizate.

[0867] The pharmaceutical compositions described herein may be presented in unit-dose or multi-dose containers, such as sealed ampoules or vials. Such containers are typically sealed in such a way to preserve the sterility and stability of the formulation until use. In general, formulations may be stored as suspensions, solutions or emulsions in oily or aqueous vehicles. Alternatively, a pharmaceutical composition may be stored in a freeze-dried condition requiring only the addition of a sterile liquid carrier immediately prior to use.

[0868] The development of suitable dosing and treatment regimens for using the particular compositions described herein in a variety of treatment regimens, including e.g., oral, parenteral, intravenous, intranasal, and intramuscular administration and formulation, is well known in the art, some of which are briefly discussed below for general purposes of illustration.

[0869] In certain applications, the pharmaceutical compositions disclosed herein may be delivered via oral administration to an animal. As such, these compositions may be formulated with an inert diluent or with an assimilable edible carrier, or they may be enclosed in hard- or soft-shell gelatin capsule, or they may be compressed into tablets, or they may be incorporated directly with the food of the diet.

[0870] The active compounds may even be incorporated with excipients and used in the form of ingestible tablets, buccal tables, troches, capsules, elixirs, suspensions, syrups, wafers, and the like (see, for example, Mathiowitz et al., Nature 1997 Mar 27;386(6623):410-4; Hwang et al., Crit Rev Ther Drug Carrier Syst 1998;15(3):243-84; U.S. Pat. No. 5,641,515; U.S. Pat. No. 5,580,579 and U.S. Pat. No. 5,792,451). Tablets, troches, pills, capsules and the like may also contain any of a variety of additional components, for example, a binder, such as gum tragacanth, acacia, cornstarch, or gelatin; excipients, such as dicalcium phosphate; a disintegrating agent, such as corn starch, potato starch, alginic acid and the like; a lubricant, such as magnesium stearate; and a sweetening agent, such as sucrose, lactose or saccharin may be added or a flavoring agent, such as peppermint, oil of wintergreen, or cherry flavoring. When the dosage unit form is a capsule, it may contain, in addition to materials of the above type, a liquid carrier. Various other materials may be present as coatings or to otherwise modify the physical form of the dosage unit. For instance, tablets, pills, or capsules may be coated with shellac, sugar, or both. Of course, any material used in preparing any dosage unit form should be pharmaceutically pure and substantially non-toxic in the amounts employed. In addition, the active compounds may be incorporated into sustained-release preparation and formulations.

[0871] Typically, these formulations will contain at least about 0.1% of the active compound or more, although the percentage of the active ingredient(s) may, of course, be varied and may conveniently be between about 1 or 2% and about 60% or 70% or more of the weight or volume of the total formulation. Naturally, the amount of active compound(s) in each therapeutically useful composition may be prepared is such a way that a suitable dosage will be obtained in any given unit dose of the compound. Factors such as solubility, bioavailability, biological half-life, route of administration, product shelf life, as well as other pharmacological considerations will be contemplated by one skilled in the art of preparing such pharmaceutical formulations, and as such, a variety of dosages and treatment regimens may be desirable.

[0872] For oral administration, the compositions of the present invention may alternatively be incorporated with one or more excipients in the form of a mouthwash, dentifrice, buccal tablet, oral spray, or sublingual orally-administered formulation. Alternatively, the active ingredient may be incorporated into an oral solution such as one containing sodium borate, glycerin and potassium bicarbonate, or dispersed in a dentifrice, or added in a therapeutically-effective amount to a composition that may include water, binders, abrasives, flavoring agents, foaming agents, and humectants. Alternatively the compositions may be fashioned into a tablet or solution form that may be placed under the tongue or otherwise dissolved in the mouth.

[0873] In certain circumstances it will be desirable to deliver the pharmaceutical compositions disclosed herein parenterally, intravenously, intramuscularly, or even intraperitoneally. Such approaches are well known to the skilled artisan, some of which are further described, for example, in U.S. Pat. No. 5,543,158; U.S. Pat. No. 5,641,515 and U.S. Pat. No. 5,399,363. In certain embodiments, solutions of the active compounds as free base or pharmacologically acceptable salts may be prepared in water suitably mixed with a surfactant, such as hydroxypropylcellulose. Dispersions may also be prepared in glycerol, liquid polyethylene glycols, and mixtures thereof and in oils. Under ordinary conditions of storage and use, these preparations generally will contain a preservative to prevent the growth of microorganisms.

[0874] Illustrative pharmaceutical forms suitable for injectable use include sterile aqueous solutions or dispersions and sterile powders for the extemporaneous preparation of sterile injectable solutions or dispersions (for example, see U.S. Pat. No. 5,466,468). In all cases the form must be sterile and must be fluid to the extent that easy syringability exists. It must be stable under the conditions of manufacture and storage and must be preserved against the contaminating action of microorganisms, such as bacteria and fungi. The carrier can be a solvent or dispersion medium containing, for example, water, ethanol, polyol (e.g., glycerol, propylene glycol, and liquid polyethylene glycol, and the like), suitable mixtures thereof, and/or vegetable oils. Proper fluidity may be maintained, for example, by the use of a coating, such as lecithin, by the maintenance of the required particle size in the case of dispersion and/or by the use of surfactants. The prevention of the action of microorganisms can be facilitated by various antibacterial and antifungal agents, for example, parabens, chlorobutanol, phenol, sorbic acid, thimerosal, and the like. In many cases, it will be preferable to include isotonic agents, for example, sugars or sodium chloride. Prolonged absorption of the injectable compositions can be brought about by the use in the compositions of agents delaying absorption, for example, aluminum monostearate and gelatin.

[0875] In one embodiment, for parenteral administration in an aqueous solution, the solution should be suitably buffered if necessary and the liquid diluent first rendered isotonic with sufficient saline or glucose. These particular aqueous solutions are especially suitable for intravenous, intramuscular, subcutaneous and intraperitoneal administration. In this connection, a sterile aqueous medium that can be employed will be known to those of skill in the art in light of the present disclosure. For example, one dosage may be dissolved in 1 ml of isotonic NaCl solution and either added to 1000 ml of hypodermoclysis fluid or injected at the proposed site of infusion, (see for example, “Remington's Pharmaceutical Sciences” 15th Edition, pages 1035-1038 and 1570-1580). Some variation in dosage will necessarily occur depending on the condition of the subject being treated. Moreover, for human administration, preparations will of course preferably meet sterility, pyrogenicity, and the general safety and purity standards as required by FDA Office of Biologics standards.

[0876] In another embodiment of the invention, the compositions disclosed herein may be formulated in a neutral or salt form. Illustrative pharmaceutically-acceptable salts include the acid addition salts (formed with the free amino groups of the protein) and which are formed with inorganic acids such as, for example, hydrochloric or phosphoric acids, or such organic acids as acetic, oxalic, tartaric, mandelic, and the like. Salts formed with the free carboxyl groups can also be derived from inorganic bases such as, for example, sodium, potassium, ammonium, calcium, or ferric hydroxides, and such organic bases as isopropylamine, trimethylamine, histidine, procaine and the like. Upon formulation, solutions will be administered in a manner compatible with the dosage formulation and in such amount as is therapeutically effective.

[0877] The carriers can further comprise any and all solvents, dispersion media, vehicles, coatings, diluents, antibacterial and antifungal agents, isotonic and absorption delaying agents, buffers, carrier solutions, suspensions, colloids, and the like. The use of such media and agents for pharmaceutical active substances is well known in the art. Except insofar as any conventional media or agent is incompatible with the active ingredient, its use in the therapeutic compositions is contemplated. Supplementary active ingredients can also be incorporated into the compositions. The phrase “pharmaceutically-acceptable” refers to molecular entities and compositions that do not produce an allergic or similar untoward reaction when administered to a human.

[0878] In certain embodiments, the pharmaceutical compositions may be delivered by intranasal sprays, inhalation, and/or other aerosol delivery vehicles. Methods for delivering genes, nucleic acids, and peptide compositions directly to the lungs via nasal aerosol sprays has been described, e.g., in U.S. Pat. No. 5,756,353 and U.S. Pat. No. 5,804,212. Likewise, the delivery of drugs using intranasal microparticle resins (Takenaga et al., J Controlled Release 1998 Mar 2;52(1-2):81-7) and lysophosphatidyl-glycerol compounds (U.S. Pat. No. 5,725,871) are also well-known in the pharmaceutical arts. Likewise, illustrative transmucosal drug delivery in the form of a polytetrafluoroetheylene support matrix is described in U.S. Pat. No. 5,780,045.

[0879] In certain embodiments, liposomes, nanocapsules, microparticles, lipid particles, vesicles, and the like, are used for the introduction of the compositions of the present invention into suitable host cells/organisms. In particular, the compositions of the present invention may be formulated for delivery either encapsulated in a lipid particle, a liposome, a vesicle, a nanosphere, or a nanoparticle or the like. Alternatively, compositions of the present invention can be bound, either covalently or non-covalently, to the surface of such carrier vehicles.

[0880] The formation and use of liposome and liposome-like preparations as potential drug carriers is generally known to those of skill in the art (see for example, Lasic, Trends Biotechnol 1998 Jul;16(7):307-21; Takakura, Nippon Rinsho 1998 Mar;56(3):691-5; Chandran et al., Indian J Exp Biol. 1997 Aug;35(8):801-9; Margalit, Crit Rev Ther Drug Carrier Syst. 1995;12(2-3):233-61; U.S. Pat. No. 5,567,434; U.S. Pat. No. 5,552,157; U.S. Pat. No. 5,565,213; U.S. Pat. No. 5,738,868 and U.S. Pat. No. 5,795,587, each specifically incorporated herein by reference in its entirety).

[0881] Liposomes have been used successfully with a number of cell types that are normally difficult to transfect by other procedures, including T cell suspensions, primary hepatocyte cultures and PC 12 cells (Renneisen et al., J Biol Chem. 1990 Sep 25;265(27):16337-42; Muller et al., DNA Cell Biol. 1990 Apr;9(3):221-9). In addition, liposomes are free of the DNA length constraints that are typical of viral-based delivery systems. Liposomes have been used effectively to introduce genes, various drugs, radiotherapeutic agents, enzymes, viruses, transcription factors, allosteric effectors and the like, into a variety of cultured cell lines and animals. Furthermore, he use of liposomes does not appear to be associated with autoimmune responses or unacceptable toxicity after systemic delivery.

[0882] In certain embodiments, liposomes are formed from phospholipids that are dispersed in an aqueous medium and spontaneously form multilamellar concentric bilayer vesicles (also termed multilamellar vesicles (MLVs).

[0883] Alternatively, in other embodiments, the invention provides for pharmaceutically-acceptable nanocapsule formulations of the compositions of the present invention. Nanocapsules can generally entrap compounds in a stable and reproducible way (see, for example, Quintanar-Guerrero et al., Drug Dev Ind Pharm. 1998 Dec;24(12):1113-28). To avoid side effects due to intracellular polymeric overloading, such ultrafine particles (sized around 0.1 μm) may be designed using polymers able to be degraded in vivo. Such particles can be made as described, for example, by Couvreur et al., Crit Rev Ther Drug Carrier Syst. 1988;5(1):1-20; zur Muhlen et al., Eur J Pharm Biopharm. 1998 Mar;45(2):149-55; Zambaux et al. J Controlled Release. 1998 Jan 2;50(1-3):31-40; and U.S. Pat. No. 5,145,684.

[0884] Cancer Therapeutic Methods

[0885] In further aspects of the present invention, the pharmaceutical compositions described herein may be used for the treatment of cancer, particularly for the immunotherapy of prostate cancer. Within such methods, the pharmaceutical compositions described herein are administered to a patient, typically a warm-blooded animal, preferably a human. A patient may or may not be afflicted with cancer. Accordingly, the above pharmaceutical compositions may be used to prevent the development of a cancer or to treat a patient afflicted with a cancer. Pharmaceutical compositions and vaccines may be administered either prior to or following surgical removal of primary tumors and/or treatment such as administration of radiotherapy or conventional chemotherapeutic drugs. As discussed above, administration of the pharmaceutical compositions may be by any suitable method, including administration by intravenous, intraperitoneal, intramuscular, subcutaneous, intranasal, intradermal, anal, vaginal, topical and oral routes.

[0886] Within certain embodiments, immunotherapy may be active immunotherapy, in which treatment relies on the in vivo stimulation of the endogenous host immune system to react against tumors with the administration of immune response-modifying agents (such as polypeptides and polynucleotides as provided herein).

[0887] Within other embodiments, immunotherapy may be passive immunotherapy, in which treatment involves the delivery of agents with established tumor-immune reactivity (such as effector cells or antibodies) that can directly or indirectly mediate antitumor effects and does not necessarily depend on an intact host immune system. Examples of effector cells include T cells as discussed above, T lymphocytes (such as CD8⁺cytotoxic T lymphocytes and CD4⁺T-helper tumor-infiltrating lymphocytes), killer cells (such as Natural Killer cells and lymphokine-activated killer cells), B cells and antigen-presenting cells (such as dendritic cells and macrophages) expressing a polypeptide provided herein. T cell receptors and antibody receptors specific for the polypeptides recited herein may be cloned, expressed and transferred into other vectors or effector cells for adoptive immunotherapy. The polypeptides provided herein may also be used to generate antibodies or anti-idiotypic antibodies (as described above and in U.S. Pat. No. 4,918,164) for passive immunotherapy.

[0888] Effector cells may generally be obtained in sufficient quantities for adoptive immunotherapy by growth in vitro, as described herein. Culture conditions for expanding single antigen-specific effector cells to several billion in number with retention of antigen recognition in vivo are well known in the art. Such in vitro culture conditions typically use intermittent stimulation with antigen, often in the presence of cytokines (such as IL-2) and non-dividing feeder cells. As noted above, immunoreactive polypeptides as provided herein may be used to rapidly expand antigen-specific T cell cultures in order to generate a sufficient number of cells for immunotherapy. In particular, antigen-presenting cells, such as dendritic, macrophage, monocyte, fibroblast and/or B cells, may be pulsed with immunoreactive polypeptides or transfected with one or more polynucleotides using standard techniques well known in the art. For example, antigen-presenting cells can be transfected with a polynucleotide having a promoter appropriate for increasing expression in a recombinant virus or other expression system. Cultured effector cells for use in therapy must be able to grow and distribute widely, and to survive long term in vivo. Studies have shown that cultured effector cells can be induced to grow in vivo and to survive long term in substantial numbers by repeated stimulation with antigen supplemented with IL-2 (see, for example, Cheever et al., Immunological Reviews 157:177, 1997).

[0889] Alternatively, a vector expressing a polypeptide recited herein may be introduced into antigen presenting cells taken from a patient and clonally propagated ex vivo for transplant back into the same patient. Transfected cells may be reintroduced into the patient using any means known in the art, preferably in sterile form by intravenous, intracavitary, intraperitoneal or intratumor administration.

[0890] Routes and frequency of administration of the therapeutic compositions described herein, as well as dosage, will vary from individual to individual, and may be readily established using standard techniques. In general, the pharmaceutical compositions and vaccines may be administered by injection (e.g., intracutaneous, intramuscular, intravenous or subcutaneous), intranasally (e.g., by aspiration) or orally. Preferably, between 1 and 10 doses may be administered over a 52 week period. Preferably, 6 doses are administered, at intervals of 1 month, and booster vaccinations may be given periodically thereafter. Alternate protocols may be appropriate for individual patients. A suitable dose is an amount of a compound that, when administered as described above, is capable of promoting an anti-tumor immune response, and is at least 10-50% above the basal (i.e., untreated) level. Such response can be monitored by measuring the anti-tumor antibodies in a patient or by vaccine-dependent generation of cytolytic effector cells capable of killing the patient's tumor cells in vitro. Such vaccines should also be capable of causing an immune response that leads to an improved clinical outcome (e.g., more frequent remissions, complete or partial or longer disease-free survival) in vaccinated patients as compared to non-vaccinated patients. In general, for pharmaceutical compositions and vaccines comprising one or more polypeptides, the amount of each polypeptide present in a dose ranges from about 25 μg to 5 mg per kg of host. Suitable dose sizes will vary with the size of the patient, but will typically range from about 0.1 mL to about 5 mL.

[0891] In general, an appropriate dosage and treatment regimen provides the active compound(s) in an amount sufficient to provide therapeutic and/or prophylactic benefit. Such a response can be monitored by establishing an improved clinical outcome (e.g., more frequent remissions, complete or partial, or longer disease-free survival) in treated patients as compared to non-treated patients. Increases in preexisting immune responses to a tumor protein generally correlate with an improved clinical outcome. Such immune responses may generally be evaluated using standard proliferation, cytotoxicity or cytokine assays, which may be performed using samples obtained from a patient before and after treatment.

[0892] Cancer Detection and Diagnostic Compositions, Methods and Kits

[0893] In general, a cancer may be detected in a patient based on the presence of one or more prostate tumor proteins and/or polynucleotides encoding such proteins in a biological sample (for example, blood, sera, sputum urine and/or tumor biopsies) obtained from the patient. In other words, such proteins may be used as markers to indicate the presence or absence of a cancer such as prostate cancer. In addition, such proteins may be useful for the detection of other cancers. The binding agents provided herein generally permit detection of the level of antigen that binds to the agent in the biological sample. Polynucleotide primers and probes may be used to detect the level of MRNA encoding a tumor protein, which is also indicative of the presence or absence of a cancer. In general, a prostate tumor sequence should be present at a level that is at least three fold higher in tumor tissue than in normal tissue.

[0894] There are a variety of assay formats known to those of ordinary skill in the art for using a binding agent to detect polypeptide markers in a sample. See, e.g., Harlow and Lane, Antibodies: A Laboratory Manual, Cold Spring Harbor Laboratory, 1988. In general, the presence or absence of a cancer in a patient may be determined by (a) contacting a biological sample obtained from a patient with a binding agent; (b) detecting in the sample a level of polypeptide that binds to the binding agent; and (c) comparing the level of polypeptide with a predetermined cut-off value.

[0895] In a preferred embodiment, the assay involves the use of binding agent immobilized on a solid support to bind to and remove the polypeptide from the remainder of the sample. The bound polypeptide may then be detected using a detection reagent that contains a reporter group and specifically binds to the binding agent/polypeptide complex. Such detection reagents may comprise, for example, a binding agent that specifically binds to the polypeptide or an antibody or other agent that specifically binds to the binding agent, such as an anti-immunoglobulin, protein G, protein A or a lectin. Alternatively, a competitive assay may be utilized, in which a polypeptide is labeled with a reporter group and allowed to bind to the immobilized binding agent after incubation of the binding agent with the sample. The extent to which components of the sample inhibit the binding of the labeled polypeptide to the binding agent is indicative of the reactivity of the sample with the immobilized binding agent. Suitable polypeptides for use within such assays include full length prostate tumor proteins and polypeptide portions thereof to which the binding agent binds, as described above.

[0896] The solid support may be any material known to those of ordinary skill in the art to which the tumor protein may be attached. For example, the solid support may be a test well in a microtiter plate or a nitrocellulose or other suitable membrane. Alternatively, the support may be a bead or disc, such as glass, fiberglass, latex or a plastic material such as polystyrene or polyvinylchloride. The support may also be a magnetic particle or a fiber optic sensor, such as those disclosed, for example, in U.S. Pat. No. 5,359,681. The binding agent may be immobilized on the solid support using a variety of techniques known to those of skill in the art, which are amply described in the patent and scientific literature. In the context of the present invention, the term “immobilization” refers to both noncovalent association, such as adsorption, and covalent attachment (which may be a direct linkage between the agent and functional groups on the support or may be a linkage by way of a cross-linking agent). Immobilization by adsorption to a well in a microtiter plate or to a membrane is preferred. In such cases, adsorption may be achieved by contacting the binding agent, in a suitable buffer, with the solid support for a suitable amount of time. The contact time varies with temperature, but is typically between about 1 hour and about 1 day. In general, contacting a well of a plastic microtiter plate (such as polystyrene or polyvinylchloride) with an amount of binding agent ranging from about 10 ng to about 10 μg, and preferably about 100 ng to about 1 μg, is sufficient to immobilize an adequate amount of binding agent.

[0897] Covalent attachment of binding agent to a solid support may generally be achieved by first reacting the support with a bifunctional reagent that will react with both the support and a functional group, such as a hydroxyl or amino group, on the binding agent. For example, the binding agent may be covalently attached to supports having an appropriate polymer coating using benzoquinone or by condensation of an aldehyde group on the support with an amine and an active hydrogen on the binding partner (see, e.g., Pierce Immunotechnology Catalog and Handbook, 1991, at A12-A13).

[0898] In certain embodiments, the assay is a two-antibody sandwich assay. This assay may be performed by first contacting an antibody that has been immobilized on a solid support, commonly the well of a microtiter plate, with the sample, such that polypeptides within the sample are allowed to bind to the immobilized antibody. Unbound sample is then removed from the immobilized polypeptide-antibody complexes and a detection reagent (preferably a second antibody capable of binding to a different site on the polypeptide) containing a reporter group is added. The amount of detection reagent that remains bound to the solid support is then determined using a method appropriate for the specific reporter group.

[0899] More specifically, once the antibody is immobilized on the support as described above, the remaining protein binding sites on the support are typically blocked. Any suitable blocking agent known to those of ordinary skill in the art, such as bovine serum albumin or Tween 2™ (Sigma Chemical Co., St. Louis, Mo.). The immobilized antibody is then incubated with the sample, and polypeptide is allowed to bind to the antibody. The sample may be diluted with a suitable diluent, such as phosphate-buffered saline (PBS) prior to incubation. In general, an appropriate contact time (i.e., incubation time) is a period of time that is sufficient to detect the presence of polypeptide within a sample obtained from an individual with prostate cancer. Preferably, the contact time is sufficient to achieve a level of binding that is at least about 95% of that achieved at equilibrium between bound and unbound polypeptide. Those of ordinary skill in the art will recognize that the time necessary to achieve equilibrium may be readily determined by assaying the level of binding that occurs over a period of time. At room temperature, an incubation time of about 30 minutes is generally sufficient.

[0900] Unbound sample may then be removed by washing the solid support with an appropriate buffer, such as PBS containing 0.1% Tween 20™. The second antibody, which contains a reporter group, may then be added to the solid support. Preferred reporter groups include those groups recited above.

[0901] The detection reagent is then incubated with the immobilized antibody-polypeptide complex for an amount of time sufficient to detect the bound polypeptide. An appropriate amount of time may generally be determined by assaying the level of binding that occurs over a period of time. Unbound detection reagent is then removed and bound detection reagent is detected using the reporter group. The method employed for detecting the reporter group depends upon the nature of the reporter group. For radioactive groups, scintillation counting or autoradiographic methods are generally appropriate. Spectroscopic methods may be used to detect dyes, luminescent groups and fluorescent groups. Biotin may be detected using avidin, coupled to a different reporter group (commonly a radioactive or fluorescent group or an enzyme). Enzyme reporter groups may generally be detected by the addition of substrate (generally for a specific period of time), followed by spectroscopic or other analysis of the reaction products.

[0902] To determine the presence or absence of a cancer, such as prostate cancer, the signal detected from the reporter group that remains bound to the solid support is generally compared to a signal that corresponds to a predetermined cut-off value. In one preferred embodiment, the cut-off value for the detection of a cancer is the average mean signal obtained when the immobilized antibody is incubated with samples from patients without the cancer. In general, a sample generating a signal that is three standard deviations above the predetermined cut-off value is considered positive for the cancer. In an alternate preferred embodiment, the cut-off value is determined using a Receiver Operator Curve, according to the method of Sackett et al., Clinical Epidemiology: A Basic Science for Clinical Medicine, Little Brown and Co., 1985, p. 106-7. Briefly, in this embodiment, the cut-off value may be determined from a plot of pairs of true positive rates (i.e., sensitivity) and false positive rates (100%-specificity) that correspond to each possible cut-off value for the diagnostic test result. The cut-off value on the plot that is the closest to the upper left-hand comer (i.e., the value that encloses the largest area) is the most accurate cut-off value, and a sample generating a signal that is higher than the cut-off value determined by this method may be considered positive. Alternatively, the cut-off value may be shifted to the left along the plot, to minimize the false positive rate, or to the right, to minimize the false negative rate. In general, a sample generating a signal that is higher than the cut-off value determined by this method is considered positive for a cancer.

[0903] In a related embodiment, the assay is performed in a flow-through or strip test format, wherein the binding agent is immobilized on a membrane, such as nitrocellulose. In the flow-through test, polypeptides within the sample bind to the immobilized binding agent as the sample passes through the membrane. A second, labeled binding agent then binds to the binding agent-polypeptide complex as a solution containing the second binding agent flows through the membrane. The detection of bound second binding agent may then be performed as described above. In the strip test format, one end of the membrane to which binding agent is bound is immersed in a solution containing the sample. The sample migrates along the membrane through a region containing second binding agent and to the area of immobilized binding agent. Concentration of second binding agent at the area of immobilized antibody indicates the presence of a cancer. Typically, the concentration of second binding agent at that site generates a pattern, such as a line, that can be read visually. The absence of such a pattern indicates a negative result. In general, the amount of binding agent immobilized on the membrane is selected to generate a visually discernible pattern when the biological sample contains a level of polypeptide that would be sufficient to generate a positive signal in the two-antibody sandwich assay, in the format discussed above. Preferred binding agents for use in such assays are antibodies and antigen-binding fragments thereof. Preferably, the amount of antibody immobilized on the membrane ranges from about 25 ng to about 1 μg, and more preferably from about 50 ng to about 500 ng. Such tests can typically be performed with a very small amount of biological sample.

[0904] Of course, numerous other assay protocols exist that are suitable for use with the tumor proteins or binding agents of the present invention. The above descriptions are intended to be exemplary only. For example, it will be apparent to those of ordinary skill in the art that the above protocols may be readily modified to use tumor polypeptides to detect antibodies that bind to such polypeptides in a biological sample. The detection of such tumor protein specific antibodies may correlate with the presence of a cancer.

[0905] A cancer may also, or alternatively, be detected based on the presence of T cells that specifically react with a tumor protein in a biological sample. Within certain methods, a biological sample comprising CD4⁺and/or CD8⁺T cells isolated from a patient is incubated with a tumor polypeptide, a polynucleotide encoding such a polypeptide and/or an APC that expresses at least an immunogenic portion of such a polypeptide, and the presence or absence of specific activation of the T cells is detected. Suitable biological samples include, but are not limited to, isolated T cells. For example, T cells may be isolated from a patient by routine techniques (such as by Ficoll/Hypaque density gradient centrifugation of peripheral blood lymphocytes). T cells may be incubated in vitro for 2-9 days (typically 4 days) at 37° C. with polypeptide (e.g., 5-25 μg/ml). It may be desirable to incubate another aliquot of a T cell sample in the absence of tumor polypeptide to serve as a control. For CD4⁺T cells, activation is preferably detected by evaluating proliferation of the T cells. For CD8⁺T cells, activation is preferably detected by evaluating cytolytic activity. A level of proliferation that is at least two fold greater and/or a level of cytolytic activity that is at least 20% greater than in disease-free patients indicates the presence of a cancer in the patient.

[0906] As noted above, a cancer may also, or alternatively, be detected based on the level of mRNA encoding a tumor protein in a biological sample. For example, at least two oligonucleotide primers may be employed in a polymerase chain reaction (PCR) based assay to amplify a portion of a tumor cDNA derived from a biological sample, wherein at least one of the oligonucleotide primers is specific for (i.e., hybridizes to) a polynucleotide encoding the tumor protein. The amplified cDNA is then separated and detected using techniques well known in the art, such as gel electrophoresis. Similarly, oligonucleotide probes that specifically hybridize to a polynucleotide encoding a tumor protein may be used in a hybridization assay to detect the presence of polynucleotide encoding the tumor protein in a biological sample.

[0907] To permit hybridization under assay conditions, oligonucleotide primers and probes should comprise an oligonucleotide sequence that has at least about 60%, preferably at least about 75% and more preferably at least about 90%, identity to a portion of a polynucleotide encoding a tumor protein of the invention that is at least 10 nucleotides, and preferably at least 20 nucleotides, in length. Preferably, oligonucleotide primers and/or probes hybridize to a polynucleotide encoding a polypeptide described herein under moderately stringent conditions, as defined above. Oligonucleotide primers and/or probes which may be usefully employed in the diagnostic methods described herein preferably are at least 10-40 nucleotides in length. In a preferred embodiment, the oligonucleotide primers comprise at least 10 contiguous nucleotides, more preferably at least 15 contiguous nucleotides, of a DNA molecule having a sequence as disclosed herein. Techniques for both PCR based assays and hybridization assays are well known in the art (see, for example, Mullis et al., Cold Spring Harbor Symp. Quant. Biol., 51:263, 1987; Erlich ed., PCR Technology, Stockton Press, N.Y., 1989).

[0908] One preferred assay employs RT-PCR, in which PCR is applied in conjunction with reverse transcription. Typically, RNA is extracted from a biological sample, such as biopsy tissue, and is reverse transcribed to produce cDNA molecules. PCR amplification using at least one specific primer generates a cDNA molecule, which may be separated and visualized using, for example, gel electrophoresis. Amplification may be performed on biological samples taken from a test patient and from an individual who is not afflicted with a cancer. The amplification reaction may be performed on several dilutions of cDNA spanning two orders of magnitude. A two-fold or greater increase in expression in several dilutions of the test patient sample as compared to the same dilutions of the non-cancerous sample is typically considered positive.

[0909] In another embodiment, the compositions described herein may be used as markers for the progression of cancer. In this embodiment, assays as described above for the diagnosis of a cancer may be performed over time, and the change in the level of reactive polypeptide(s) or polynucleotide(s) evaluated. For example, the assays may be performed every 24-72 hours for a period of 6 months to 1 year, and thereafter performed as needed. In general, a cancer is progressing in those patients in whom the level of polypeptide or polynucleotide detected increases over time. In contrast, the cancer is not progressing when the level of reactive polypeptide or polynucleotide either remains constant or decreases with time.

[0910] Certain in vivo diagnostic assays may be performed directly on a tumor. One such assay involves contacting tumor cells with a binding agent. The bound binding agent may then be detected directly or indirectly via a reporter group. Such binding agents may also be used in histological applications. Alternatively, polynucleotide probes may be used within such applications.

[0911] As noted above, to improve sensitivity, multiple tumor protein markers may be assayed within a given sample. It will be apparent that binding agents specific for different proteins provided herein may be combined within a single assay. Further, multiple primers or probes may be used concurrently. The selection of tumor protein markers may be based on routine experiments to determine combinations that results in optimal sensitivity. In addition, or alternatively, assays for tumor proteins provided herein may be combined with assays for other known tumor antigens.

[0912] The present invention further provides kits for use within any of the above diagnostic methods. Such kits typically comprise two or more components necessary for performing a diagnostic assay. Components may be compounds, reagents, containers and/or equipment. For example, one container within a kit may contain a monoclonal antibody or fragment thereof that specifically binds to a tumor protein. Such antibodies or fragments may be provided attached to a support material, as described above. One or more additional containers may enclose elements, such as reagents or buffers, to be used in the assay. Such kits may also, or alternatively, contain a detection reagent as described above that contains a reporter group suitable for direct or indirect detection of antibody binding.

[0913] Alternatively, a kit may be designed to detect the level of mRNA encoding a tumor protein in a biological sample. Such kits generally comprise at least one oligonucleotide probe or primer, as described above, that hybridizes to a polynucleotide encoding a tumor protein. Such an oligonucleotide may be used, for example, within a PCR or hybridization assay. Additional components that may be present within such kits include a second oligonucleotide and/or a diagnostic reagent or container to facilitate the detection of a polynucleotide encoding a tumor protein.

[0914] The following Examples are offered by way of illustration and not by way of limitation.

### EXAMPLES

### EXAMPLE 1

### Isolation And Characterization Of Prostate-specific Polypeptides

[0915] This Example describes the isolation of certain prostate-specific polypeptides from a prostate tumor cDNA library.

[0916] A human prostate tumor cDNA expression library was constructed from prostate tumor poly A⁺RNA using a Superscript Plasmid System for cDNA Synthesis and Plasmid Cloning kit (BRL Life Technologies, Gaithersburg, Md. 20897) following the manufacturer's protocol. Specifically, prostate tumor tissues were homogenized with polytron (Kinematica, Switzerland) and total RNA was extracted using Trizol reagent (BRL Life Technologies) as directed by the manufacturer. The poly A⁺RNA was then purified using a Qiagen oligotex spin column mRNA purification kit (Qiagen, Santa Clarita, Calif. 91355) according to the manufacturer's protocol. First-strand cDNA was synthesized using the NotI/Oligo-dT18 primer. Double-stranded cDNA was synthesized, ligated with EcoRI/BAXI adaptors (Invitrogen, San Diego, Calif.) and digested with NotI. Following size fractionation with Chroma Spin-1000 columns (Clontech, Palo Alto, Calif.), the cDNA was ligated into the EcoRI/NotI site of pCDNA3.1 (Invitrogen) and transformed into ElectroMax E. coli DH10B cells (BRL Life Technologies) by electroporation.

[0917] Using the same procedure, a normal human pancreas cDNA expression library was prepared from a pool of six tissue specimens (Clontech). The cDNA libraries were characterized by determining the number of independent colonies, the percentage of clones that carried insert, the average insert size and by sequence analysis. The prostate tumor library contained 1.64×10⁷ independent colonies, with 70% of clones having an insert and the average insert size being 1745 base pairs. The normal pancreas cDNA library contained 3.3×10⁶ independent colonies, with 69% of clones having inserts and the average insert size being 1120 base pairs. For both libraries, sequence analysis showed that the majority of clones had a full length cDNA sequence and were synthesized from mRNA, with minimal rRNA and mitochondrial DNA contamination.

[0918] cDNA library subtraction was performed using the above prostate tumor and normal pancreas cDNA libraries, as described by Hara et al. (Blood, 84:189-199, 1994) with some modifications. Specifically, a prostate tumor-specific subtracted cDNA library was generated as follows. Normal pancreas cDNA library (70 μg) was digested with EcoRI, NotI, and SfuI, followed by a filling-in reaction with DNA polymerase Klenow fragment. After phenol-chloroform extraction and ethanol precipitation, the DNA was dissolved in 100 μl of H₂O heat-denatured and mixed with 100 μl (100 μg) of Photoprobe biotin (Vector Laboratories, Burlingame, Calif.). As recommended by the manufacturer, the resulting mixture was irradiated with a 270 W sunlamp on ice for 20 minutes. Additional Photoprobe biotin (50 μl) was added and the biotinylation reaction was repeated. After extraction with butanol five times, the DNA was ethanol-precipitated and dissolved in 23 μl H₂O to form the driver DNA.

[0919] To form the tracer DNA, 10 μg prostate tumor cDNA library was digested with BamHI and XhoI, phenol chloroform extracted and passed through Chroma spin-400 columns (Clontech). Following ethanol precipitation, the tracer DNA was dissolved in 5 μl H₂O. Tracer DNA was mixed with 15 μl driver DNA and 20 μl of 2× hybridization buffer (1.5 M NaCl/10 mM EDTA/50 mM HEPES pH 7.5/0.2% sodium dodecyl sulfate), overlaid with mineral oil, and heat-denatured completely. The sample was immediately transferred into a 68° C. water bath and incubated for 20 hours (long hybridization [LH]). The reaction mixture was then subjected to a streptavidin treatment followed by phenol/chloroform extraction. This process was repeated three more times. Subtracted DNA was precipitated, dissolved in 12 μl H₂O, mixed with 8 μl driver DNA and 20 μl of 2× hybridization buffer, and subjected to a hybridization at 68° C. for 2 hours (short hybridization [SH]). After removal of biotinylated double-stranded DNA, subtracted cDNA was ligated into BamHI/XhoI site of chloramphenicol resistant pBCSK+(Stratagene, La Jolla, Calif. 92037) and transformed into ElectroMax E. coli DH10B cells by electroporation to generate a prostate tumor specific subtracted cDNA library (referred to as “prostate subtraction 1”).

[0920] To analyze the subtracted cDNA library, plasmid DNA was prepared from 100 independent clones, randomly picked from the subtracted prostate tumor specific library and grouped based on insert size. Representative cDNA clones were further characterized by DNA sequencing with a Perkin Elmer/Applied Biosystems Division Automated Sequencer Model 373A (Foster City, Calif.). Six cDNA clones, hereinafter referred to as F1-13, F1-12, F1-16, H1-1, H1-9 and H1-4, were shown to be abundant in the subtracted prostate-specific cDNA library. The determined 3′ and 5′ cDNA sequences for F1-12 are provided in SEQ ID NO: 2 and 3, respectively, with determined 3′ cDNA sequences for F1-13, F1-16, H1-1, H1-9 and H1-4 being provided in SEQ ID NO: 1 and 4-7, respectively.

[0921] The cDNA sequences for the isolated clones were compared to known sequences in the gene bank using the EMBL and GenBank databases (release 96). Four of the prostate tumor cDNA clones, F1-13, F1-16, H1-1, and H1-4, were determined to encode the following previously identified proteins: prostate specific antigen (PSA), human glandular kallikrein, human tumor expression enhanced gene, and mitochondria cytochrome C oxidase subunit II. H1-9 was found to be identical to a previously identified human autonomously replicating sequence. No significant homologies to the cDNA sequence for F1-12 were found.

[0922] Subsequent studies led to the isolation of a full-length cDNA sequence for F1-12 (also referred to as P504S). This sequence is provided in SEQ ID NO: 107, with the corresponding predicted amino acid sequence being provided in SEQ ID NO: 108. cDNA splice variants of P504S are provided in SEQ ID NO: 600-605.

[0923] To clone less abundant prostate tumor specific genes, cDNA library subtraction was performed by subtracting the prostate tumor cDNA library described above with the normal pancreas cDNA library and with the three most abundant genes in the previously subtracted prostate tumor specific cDNA library: human glandular kallikrein, prostate specific antigen (PSA), and mitochondria cytochrome C oxidase subunit II. Specifically, 1 μg each of human glandular kallikrein, PSA and mitochondria cytochrome C oxidase subunit II cDNAs in pCDNA3.1 were added to the driver DNA and subtraction was performed as described above to provide a second subtracted cDNA library hereinafter referred to as the “subtracted prostate tumor specific cDNA library with spike”.

[0924] Twenty-two cDNA clones were isolated from the subtracted prostate tumor specific cDNA library with spike. The determined 3′ and 5′ cDNA sequences for the clones referred to as J1-17, L1-12, N1-1862, J1-13, J1-19, J1-25, J1-24, K1-58, K1-63, L1-4 and L1-14 are provided in SEQ ID NOS: 8-9, 10-11, 12-13, 14-15, 16-17, 18-19, 20-21, 22-23, 24-25, 26-27 and 28-29, respectively. The determined 3′ cDNA sequences for the clones referred to as J1-12, J1-16, J1-21, K1-48, K1-55, L1-2, L1-6, N1-1858, N1-1860, N1-1861, N1-1864 are provided in SEQ ID NOS: 30-40, respectively. Comparison of these sequences with those in the gene bank as described above, revealed no significant homologies to three of the five most abundant DNA species, (J1-17, L1-12 and N1-1862; SEQ ID NOS: 8-9, 10-11 and 12-13, respectively). Of the remaining two most abundant species, one (J1-12; SEQ ID NO:30) was found to be identical to the previously identified human pulmonary surfactant-associated protein, and the other (K1-48; SEQ ID NO:33) was determined to have some homology to R. norvegicus rnRNA for 2-arylpropionyl-CoA epimerase. Of the 17 less abundant cDNA clones isolated from the subtracted prostate tumor specific cDNA library with spike, four (J1-16, K1-55, L1-6 and NI-1864; SEQ ID NOS:31, 34, 36 and 40, respectively) were found to be identical to previously identified sequences, two (J1-21 and N1-1860; SEQ ID NOS: 32 and 38, respectively) were found to show some homology to non-human sequences, and two (L1-2 and N1-1861; SEQ ID NOS: 35 and 39, respectively) were found to show some homology to known human sequences. No significant homologies were found to the polypeptides J1-13, J1-19, J1-24, J1-25, K1-58, K1-63, L1-4, L1-14 (SEQ ID NOS: 14-15, 16-17, 20-21, 18-19, 22-23, 24-25, 26-27, 28-29, respectively).

[0925] Subsequent studies led to the isolation of full length cDNA sequences for J1-17, L1-12 and N1-1862 (SEQ ID NOS: 109-111, respectively). The corresponding predicted amino acid sequences are provided in SEQ ID NOS: 112-114. L1-12 is also referred to as P501S. A cDNA splice variant of P501S is provided in SEQ ID NO: 606.

[0926] In a further experiment, four additional clones were identified by subtracting a prostate tumor cDNA library with normal prostate cDNA prepared from a pool of three normal prostate poly A+ RNA (referred to as “prostate subtraction 2”). The determined cDNA sequences for these clones, hereinafter referred to as U1-3064, U1-3065, V1-3692 and 1A-3905, are provided in SEQ ID NO: 69-72, respectively. Comparison of the determined sequences with those in the gene bank revealed no significant homologies to U1-3065.

[0927] A second subtraction with spike (referred to as “prostate subtraction spike 2”) was performed by subtracting a prostate tumor specific cDNA library with spike with normal pancreas cDNA library and further spiked with PSA, J1-17, pulmonary surfactant-associated protein, mitochondrial DNA, cytochrome c oxidase subunit II, N1-1862, autonomously replicating sequence, L1-12 and tumor expression enhanced gene. Four additional clones, hereinafter referred to as V1-3686, R1-2330, 1B-3976 and V1-3679, were isolated. The determined cDNA sequences for these clones are provided in SEQ ID NO:73-76, respectively. Comparison of these sequences with those in the gene bank revealed no significant homologies to V1-3686 and R1-2330.

[0928] Further analysis of the three prostate subtractions described above (prostate subtraction 2, subtracted prostate tumor specific cDNA library with spike, and prostate subtraction spike 2) resulted in the identification of sixteen additional clones, referred to as 1G-4736, 1G-4738, 1G-4741, 1G-4744, 1G-4734, 1H-4774, 1H-4781, 1H-4785, 1H-4787, 1H-4796, 1I-4810, 1I-4811, 1J-4876, 1K-4884 and 1K-4896. The determined cDNA sequences for these clones are provided in SEQ ID NOS: 77-92, respectively. Comparison of these sequences with those in the gene bank as described above, revealed no significant homologies to 1G-4741, 1G-4734, 1I-4807, 1J-4876 and 1K-4896 (SEQ ID NOS: 79, 81, 87, 90 and 92, respectively). Further analysis of the isolated clones led to the determination of extended cDNA sequences for 1G-4736, 1G-4738, 1G-4741, 1G-4744, 1H-4774, 1H-4781, 1H-4785, 1H-4787, 1H-4796, 1I-4807, 1J-4876, 1K-4884 and 1K-4896, provided in SEQ ID NOS: 179-188 and 191-193, respectively, and to the determination of additional partial cDNA sequences for 1I-4810 and 1i-4811, provided in SEQ ID NOS: 189 and 190, respectively.

[0929] Additional studies with prostate subtraction spike 2 resulted in the isolation of three more clones. Their sequences were determined as described above and compared to the most recent GenBank. All three clones were found to have homology to known genes, which are Cysteine-rich protein, KIAA0242, and KIAA0280 (SEQ ID NO: 317, 319, and 320, respectively). Further analysis of these clones by Synteni microarray (Synteni, Palo Alto, Calif.) demonstrated that all three clones were over-expressed in most prostate tumors and prostate BPH, as well as in the majority of normal prostate tissues tested, but low expression in all other normal tissues.

[0930] An additional subtraction was performed by subtracting a normal prostate cDNA library with normal pancreas cDNA (referred to as “prostate subtraction 3”). This led to the identification of six additional clones referred to as 1G-4761, 1G-4762, 1H-4766, 1H-4770, 1H-4771 and 1H-4772 (SEQ ID NOS: 93-98). Comparison of these sequences with those in the gene bank revealed no significant homologies to 1G-4761 and 1H-4771 (SEQ ID NOS: 93 and 97, respectively). Further analysis of the isolated clones led to the determination of extended cDNA sequences for 1G-4761, 1G-4762, 1H-4766 and 1H-4772 provided in SEQ ID NOS: 194-196 and 199, respectively, and to the determination of additional partial cDNA sequences for 1H-4770 and 1H-4771, provided in SEQ ID NOS: 197 and 198, respectively.

[0931] Subtraction of a prostate tumor cDNA library, prepared from a pool of polyA+ RNA from three prostate cancer patients, with a normal pancreas cDNA library (prostate subtraction 4) led to the identification of eight clones, referred to as 1D-4297, 1D-4309, 1D.1-4278, 1D-4288, 1D-4283, 1D-4304, 1D-4296 and 1D-4280 (SEQ ID NOS: 99-107). These sequences were compared to those in the gene bank as described above. No significant homologies were found to 1D-4283 and 1D-4304 (SEQ ID NOS: 103 and 104, respectively). Further analysis of the isolated clones led to the determination of extended cDNA sequences for 1D-4309, 1D.1-4278, 1D-4288, 1D-4283, 1D-4304, 1D-4296 and 1D-4280, provided in SEQ ID NOS: 200-206, respectively.

[0932] cDNA clones isolated in prostate subtraction 1 and prostate subtraction 2, described above, were colony PCR amplified and their mRNA expression levels in prostate tumor, normal prostate and in various other normal tissues were determined using microarray technology (Synteni, Palo Alto, Calif.). Briefly, the PCR amplification products were dotted onto slides in an array format, with each product occupying a unique location in the array. mRNA was extracted from the tissue sample to be tested, reverse transcribed, and fluorescent-labeled cDNA probes were generated. The microarrays were probed with the labeled cDNA probes, the slides scanned and fluorescence intensity was measured. This intensity correlates with the hybridization intensity. Two clones (referred to as P509S and P510S) were found to be over-expressed in prostate tumor and normal prostate and expressed at low levels in all other normal tissues tested (liver, pancreas, skin, bone marrow, brain, breast, adrenal gland, bladder, testes, salivary gland, large intestine, kidney, ovary, lung, spinal cord, skeletal muscle and colon). The determined cDNA sequences for P509S and P510S are provided in SEQ ID NO: 223 and 224, respectively. Comparison of these sequences with those in the gene bank as described above, revealed some homology to previously identified ESTs.

[0933] Additional, studies led to the isolation of the full-length cDNA sequence for P509S. This sequence is provided in SEQ ID NO: 332, with the corresponding predicted amino acid sequence being provided in SEQ ID NO: 339. Two variant full-length cDNA sequences for P510S are provided in SEQ ID NO: 535 and 536, with the corresponding predicted amino acid sequences being provided in SEQ ID NO: 537 and 538, respectively. Additional splice variants of P510S are provided in SEQ ID NO: 598 and 599.

[0934] The determined cDNA sequences for additional prostate-specific clones isolated during characterization of prostate specific cDNA libraries are provided in SEQ ID NO: 618-689, 691-697 and 709-772. Comparison of these sequences with those in the public databases revealed no significant homologies to any of these sequences.

### EXAMPLE 2

### Determination of Tissue Specificity of Prostate-specific Polypeptides

[0935] Using gene specific primers, mRNA expression levels for the representative prostate-specific polypeptides F1-16, H1-1, J1-17 (also referred to as P502S), L1-12 (also referred to as P501S), F1-12 (also referred to as P504S) and N1-1862 (also referred to as P503S) were examined in a variety of normal and tumor tissues using RT-PCR.

[0936] Briefly, total RNA was extracted from a variety of normal and tumor tissues using Trizol reagent as described above. First strand synthesis was carried out using 1-2 μg of total RNA with SuperScript II reverse transcriptase (BRL Life Technologies) at 42° C. for one hour. The cDNA was then amplified by PCR with gene-specific primers. To ensure the semi-quantitative nature of the RT-PCR, β-actin was used as an internal control for each of the tissues examined. First, serial dilutions of the first strand cDNAs were prepared and RT-PCR assays were performed using β-actin specific primers. A dilution was then chosen that enabled the linear range amplification of the β-actin template and which was sensitive enough to reflect the differences in the initial copy numbers. Using these conditions, the β-actin levels were determined for each reverse transcription reaction from each tissue. DNA contamination was minimized by DNase treatment and by assuring a negative PCR result when using first strand cDNA that was prepared without adding reverse transcriptase.

[0937] mRNA Expression levels were examined in four different types of tumor tissue (prostate tumor from 2 patients, breast tumor from 3 patients, colon tumor, lung tumor), and sixteen different normal tissues, including prostate, colon, kidney, liver, lung, ovary, pancreas, skeletal muscle, skin, stomach, testes, bone marrow and brain. F1-16 was found to be expressed at high levels in prostate tumor tissue, colon tumor and normal prostate, and at lower levels in normal liver, skin and testes, with expression being undetectable in the other tissues examined. H1-1 was found to be expressed at high levels in prostate tumor, lung tumor, breast tumor, normal prostate, normal colon and normal brain, at much lower levels in normal lung, pancreas, skeletal muscle, skin, small intestine, bone marrow, and was not detected in the other tissues tested. J1-17 (P502S) and L1-12 (P501S) appear to be specifically over-expressed in prostate, with both genes being expressed at high levels in prostate tumor and normal prostate but at low to undetectable levels in all the other tissues examined. N1-1862 (P503S) was found to be over-expressed in 60% of prostate tumors and detectable in normal colon and kidney. The RT-PCR results thus indicate that F1-16, H1-1, J1-17 (P502S), N1-1862 (P503S) and L1-12 (P501S) are either prostate specific or are expressed at significantly elevated levels in prostate.

[0938] Further RT-PCR studies showed that F1-12 (P504S) is over-expressed in 60% of prostate tumors, detectable in normal kidney but not detectable in all other tissues tested. Similarly, R1-2330 was shown to be over-expressed in 40% of prostate tumors, detectable in normal kidney and liver, but not detectable in all other tissues tested. U1-3064 was found to be over-expressed in 60% of prostate tumors, and also expressed in breast and colon tumors, but was not detectable in normal tissues.

[0939] RT-PCR characterization of R1-2330, U1-3064 and 1D-4279 showed that these three antigens are over-expressed in prostate and/or prostate tumors.

[0940] Northern analysis with four prostate tumors, two normal prostate samples, two BPH prostates, and normal colon, kidney, liver, lung, pancrease, skeletal muscle, brain, stomach, testes, small intestine and bone marrow, showed that L1-12 (P501S) is over-expressed in prostate tumors and normal prostate, while being undetectable in other normal tissues tested. J1-17 (P502S) was detected in two prostate tumors and not in the other tissues tested. N1-1862 (P503S) was found to be over-expressed in three prostate tumors and to be expressed in normal prostate, colon and kidney, but not in other tissues tested. F1-12 (P504S) was found to be highly expressed in two prostate tumors and to be undetectable in all other tissues tested.

[0941] The microarray technology described above was used to determine the expression levels of representative antigens described herein in prostate tumor, breast tumor and the following normal tissues: prostate, liver, pancreas, skin, bone marrow, brain, breast, adrenal gland, bladder, testes, salivary gland, large intestine, kidney, ovary, lung, spinal cord, skeletal muscle and colon. L1-12 (P501S) was found to be over-expressed in normal prostate and prostate tumor, with some expression being detected in normal skeletal muscle. Both J1-12 and F1-12 (P504S) were found to be over-expressed in prostate tumor, with expression being lower or undetectable in all other tissues tested. N1-1862 (P503S) was found to be expressed at high levels in prostate tumor and normal prostate, and at low levels in normal large intestine and normal colon, with expression being undetectable in all other tissues tested. R1-2330 was found to be over-expressed in prostate tumor and normal prostate, and to be expressed at lower levels in all other tissues tested. 1D-4279 was found to be over-expressed in prostate tumor and normal prostate, expressed at lower levels in normal spinal cord, and to be undetectable in all other tissues tested.

[0942] Further microarray analysis to specifically address the extent to which P501S (SEQ ID NO: 110) was expressed in breast tumor revealed moderate over-expression not only in breast tumor, but also in metastatic breast tumor (2/31), with negligible to low expression in normal tissues. This data suggests that P501S may be over-expressed in various breast tumors as well as in prostate tumors.

[0943] The expression levels of 32 ESTs (expressed sequence tags) described by Vasmatzis et al. (Proc. Natl. Acad. Sci. USA 95:300-304, 1998) in a variety of tumor and normal tissues were examined by microarray technology as described above. Two of these clones (referred to as P1000C and P1001C) were found to be over-expressed in prostate tumor and normal prostate, and expressed at low to undetectable levels in all other tissues tested (normal aorta, thymus, resting and activated PBMC, epithelial cells, spinal cord, adrenal gland, fetal tissues, skin, salivary gland, large intestine, bone marrow, liver, lung, dendritic cells, stomach, lymph nodes, brain, heart, small intestine, skeletal muscle, colon and kidney. The determined cDNA sequences for P1000C and P1001C are provided in SEQ ID NO: 384 and 472, respectively. The sequence of P1001C was found to show some homology to the previously isolated Human mRNA for JM27 protein. Subsequent comparison of the sequence of SEQ ID NO: 384 with sequences in the public databases, led to the identification of a full-length cDNA sequence of P1000C (SEQ ID NO: 929), which encodes a 492 amino acid sequence. Analysis of the amino acid sequence using the PSORT II program led to the identification of a putative transmembrane domain from amino acids 84-100. The cDNA sequence of the open reading frame of P1000C, including the stop codon, is provided in SEQ ID NO: 930, with the open reading frame without the stop codon being provided in SEQ ID NO: 931. The full-length amino acid sequence of P1000C is provided in SEQ ID NO: 932. SEQ ID NO: 933 and 934 represent amino acids 1-100 and 100-492 of P1000C, respectively.

[0944] The expression of the polypeptide encoded by the full length cDNA sequence for F1-12 (also referred to as P504S; SEQ ID NO: 108) was investigated by immunohistochemical analysis. Rabbit-anti-P504S polyclonal antibodies were generated against the full length P504S protein by standard techniques. Subsequent isolation and characterization of the polyclonal antibodies were also performed by techniques well known in the art. Immunohistochemical analysis showed that the P504S polypeptide was expressed in 100% of prostate carcinoma samples tested (n=5).

[0945] The rabbit-anti-P504S polyclonal antibody did not appear to label benign prostate cells with the same cytoplasmic granular staining, but rather with light nuclear staining. Analysis of normal tissues revealed that the encoded polypeptide was found to be expressed in some, but not all normal human tissues. Positive cytoplasmic staining with rabbit-anti-P504S polyclonal antibody was found in normal human kidney, liver, brain, colon and lung-associated macrophages, whereas heart and bone marrow were negative.

[0946] This data indicates that the P504S polypeptide is present in prostate cancer tissues, and that there are qualitative and quantitative differences in the staining between benign prostatic hyperplasia tissues and prostate cancer tissues, suggesting that this polypeptide may be detected selectively in prostate tumors and therefore be useful in the diagnosis of prostate cancer.

### EXAMPLE 3

### Isolation and Characterization of Prostate-specific Polypeptides by PCR-based Subtraction

[0947] A cDNA subtraction library, containing cDNA from normal prostate subtracted with ten other normal tissue cDNAs (brain, heart, kidney, liver, lung, ovary, placenta, skeletal muscle, spleen and thymus) and then submitted to a first round of PCR amplification, was purchased from Clontech. This library was subjected to a second round of PCR amplification, following the manufacturer's protocol. The resulting cDNA fragments were subcloned into the vector pT7 Blue T-vector (Novagen, Madison, Wis.) and transformed into XL-1 Blue MRF' E. coli (Stratagene). DNA was isolated from independent clones and sequenced using a Perkin Elmer/Applied Biosystems Division Automated Sequencer Model 373A.

[0948] Fifty-nine positive clones were sequenced. Comparison of the DNA sequences of these clones with those in the gene bank, as described above, revealed no significant homologies to 25 of these clones, hereinafter referred to as P5, P8, P9, P18, P20, P30, P34, P36, P38, P39, P42, P49, P50, P53, P55, P60, P64, P65, P73, P75, P76, P79 and P84. The determined cDNA sequences for these clones are provided in SEQ ID NO: 41-45, 47-52 and 54-65, respectively. P29, P47, P68, P80 and P82 (SEQ ID NO: 46, 53 and 66-68, respectively) were found to show some degree of homology to previously identified DNA sequences. To the best of the inventors' knowledge, none of these sequences have been previously shown to be present in prostate.

[0949] Further studies employing the sequence of SEQ ID NO: 67 as a probe in standard full-length cloning methods, resulted in the isolation of three cDNA sequences which appear to be splice variants of P80 (also known as P704P). These sequences are provided in SEQ ID NO: 699-701.

[0950] Further studies using the PCR-based methodology described above resulted in the isolation of more than 180 additional clones, of which 23 clones were found to show no significant homologies to known sequences. The determined cDNA sequences for these clones are provided in SEQ ID NO: 115-123, 127, 131, 137, 145, 147-151, 153, 156-158 and 160. Twenty-three clones (SEQ ID NO: 124-126, 128-130, 132-136, 138-144, 146, 152, 154, 155 and 159) were found to show some homology to previously identified ESTs. An additional ten clones (SEQ ID NO: 161-170) were found to have some degree of homology to known genes. Larger cDNA clones containing the P20 sequence represent splice variants of a gene referred to as P703P. The determined DNA sequence for the variants referred to as DE1, DE13 and DE14 are provided in SEQ ID NOS: 171, 175 and 177, respectively, with the corresponding predicted amino acid sequences being provided in SEQ ID NO: 172, 176 and 178, respectively. The determined cDNA sequence for an extended spliced form of P703 is provided in SEQ ID NO: 225. The DNA sequences for the splice variants referred to as DE2 and DE6 are provided in SEQ ID NOS: 173 and 174, respectively.

[0951] mRNA Expression levels for representative clones in tumor tissues (prostate (n=5), breast (n—2), colon and lung) normal tissues (prostate (n=5), colon, kidney, liver, lung (n=2), ovary (n=2), skeletal muscle, skin, stomach, small intestine and brain), and activated and non-activated PBMC was determined by RT-PCR as described above. Expression was examined in one sample of each tissue type unless otherwise indicated.

[0952] P9 was found to be highly expressed in normal prostate and prostate tumor compared to all normal tissues tested except for normal colon which showed comparable expression. P20, a portion of the P703P gene, was found to be highly expressed in normal prostate and prostate tumor, compared to all twelve normal tissues tested. A modest increase in expression of P20 in breast tumor (n=2), colon tumor and lung tumor was seen compared to all normal tissues except lung (1 of 2). Increased expression of P 18 was found in normal prostate, prostate tumor and breast tumor compared to other normal tissues except lung and stomach. A modest increase in expression of P5 was observed in normal prostate compared to most other normal tissues. However, some elevated expression was seen in normal lung and PBMC. Elevated expression of P5 was also observed in prostate tumors (2 of 5), breast tumor and one lung tumor sample. For P30, similar expression levels were seen in normal prostate and prostate tumor, compared to six of twelve other normal tissues tested. Increased expression was seen in breast tumors, one lung tumor sample and one colon tumor sample, and also in normal PBMC. P29 was found to be over-expressed in prostate tumor (5 of 5) and normal prostate (5 of 5) compared to the majority of normal tissues. However, substantial expression of P29 was observed in normal colon and normal lung (2 of 2). P80 was found to be over-expressed in prostate tumor (5 of 5) and normal prostate (5 of 5) compared to all other normal tissues tested, with increased expression also being seen in colon tumor.

[0953] Further studies resulted in the isolation of twelve additional clones, hereinafter referred to as 10-d8, 10-h10, 11-c8, 7-g6, 8-b5, 8-b6, 8-d4, 8-d9, 8-g3, 8-h11, 9-f12 and 9-f3. The determined DNA sequences for 10-d8, 10-h10, 11-c8, 8-d4, 8-d9, 8-h11, 9-f12 and 9-f3 are provided in SEQ ID NO: 207, 208, 209, 216, 217, 220, 221 and 222, respectively. The determined forward and reverse DNA sequences for 7-g6, 8-b5, 8-b6 and 8-g3 are provided in SEQ ID NO: 210 and 211; 212 and 213; 214 and 215; and 218 and 219, respectively. Comparison of these sequences with those in the gene bank revealed no significant homologies to the sequence of 9-f3. The clones 10-d8, 11-c8 and 8-h11 were found to show some homology to previously isolated ESTs, while 10-h10, 8-b5, 8-b6, 8-d4, 8-d9, 8-g3 and 9-f12 were found to show some homology to previously identified genes. Further characterization of 7-G6 and 8-G3 showed identity to the known genes PAP and PSA, respectively.

[0954] mRNA expression levels for these clones were determined using the micro-array technology described above. The clones 7-G6, 8-G3, 8-B5, 8-B6, 8-D4, 8-D9, 9-F3, 9-F12, 9-H3, 10-A2, 10-A4, 11-C9 and 11-F2 were found to be over-expressed in prostate tumor and normal prostate, with expression in other tissues tested being low or undetectable. Increased expression of 8-F11 was seen in prostate tumor and normal prostate, bladder, skeletal muscle and colon. Increased expression of 10-H10 was seen in prostate tumor and normal prostate, bladder, lung, colon, brain and large intestine. Increased expression of 9-B1 was seen in prostate tumor, breast tumor, and normal prostate, salivary gland, large intestine and skin, with increased expression of 11-C8 being seen in prostate tumor, and normal prostate and large intestine.

[0955] An additional cDNA fragment derived from the PCR-based normal prostate subtraction, described above, was found to be prostate specific by both micro-array technology and RT-PCR. The determined cDNA sequence of this clone (referred to as 9-A11) is provided in SEQ ID NO: 226. Comparison of this sequence with those in the public databases revealed 99% identity to the known gene HOXB13.

[0956] Further studies led to the isolation of the clones 8-C6 and 8-H7. The determined cDNA sequences for these clones are provided in SEQ ID NO: 227 and 228, respectively. These sequences were found to show some homology to previously isolated ESTs.

[0957] PCR and hybridization-based methodologies were employed to obtain longer cDNA sequences for clone P20 (also referred to as P703P), yielding three additional cDNA fragments that progressively extend the 5′ end of the gene. These fragments, referred to as P703PDE5, P703P6.26, and P703PX-23 (SEQ ID NO: 326, 328 and 330, with the predicted corresponding amino acid sequences being provided in SEQ ID NO: 327, 329 and 331, respectively) contain additional 5′ sequence. P703PDE5 was recovered by screening of a cDNA library (#141-26) with a portion of P703P as a probe. P703P6.26 was recovered from a mixture of three prostate tumor cDNAs and P703PX_{—}23 was recovered from cDNA library (#438-48). Together, the additional sequences include all of the putative mature serine protease along with part of the putative signal sequence. The full-length cDNA sequence for P703P is provided in SEQ ID NO: 524, with the corresponding amino acid sequence being provided in SEQ ID NO: 525.

[0958] Using computer algorithms, the following regions of P703P were predicted to represent potential HLA A2-binding CTL epitopes: amino acids 164-172 of SEQ ID NO: 525 (SEQ ID NO: 866); amino acids 160-168 of SEQ ID NO: 525 (SEQ ID NO: 867); amino acids 239-247 of SEQ ID NO: 525 (SEQ ID NO: 868); amino acids 118-126 of SEQ ID NO: 525 (SEQ ID NO: 869); amino acids 112-120 of SEQ ID NO: 525 (SEQ ID NO: 870); amino acids 155-164 of SEQ ID NO: 525 (SEQ ID NO: 871); amino acids 117-126 of SEQ ID NO: 525 (SEQ ID NO: 872); amino acids 164-173 of SEQ ID NO: 525 (SEQ ID NO: 873); amino acids 154-163 of SEQ ID NO: 525 (SEQ ID NO: 874); amino acids 163-172 of SEQ ID NO: 525 (SEQ ID NO: 875); amino acids 58-66 of SEQ ID NO: 525 (SEQ ID NO: 876); and amino acids 59-67 of SEQ ID NO: 525 (SEQ ID NO: 877).

[0959] P703P was found to show some homology to previously identified proteases, such as thrombin. The thrombin receptor has been shown to be preferentially expressed in highly metastatic breast carcinoma cells and breast carcinoma biopsy samples. Introduction of thrombin receptor antisense cDNA has been shown to inhibit the invasion of metastatic breast carcinoma cells in culture. Antibodies against thrombin receptor inhibit thrombin receptor activation and thrombin-induced platelet activation. Furthermore, peptides that resemble the receptor's tethered ligand domain inhibit platelet aggregation by thrombin. P703P may play a role in prostate cancer through a protease-activated receptor on the cancer cell or on stromal cells. The potential trypsin-like protease activity of P703P may either activate a protease-activated receptor on the cancer cell membrane to promote tumorgenesis or activate a protease-activated receptor on the adjacent cells (such as stromal cells) to secrete growth factors and/or proteases (such as matrix metalloproteinases) that could promote tumor angiogenesis, invasion and metastasis. P703P may thus promote tumor progression and/or metastasis through the activation of protease-activated receptor. Polypeptides and antibodies that block the P703P-receptor interaction may therefore be usefully employed in the treatment of prostate cancer.

[0960] To determine whether P703P expression increases with increased severity of Gleason grade, an indicator of tumor stage, quantitative PCR analysis was performed on prostate tumor samples with a range of Gleason scores from 5 to >8. The mean level of P703P expression increased with increasing Gleason score, indicating that P703P expression may correlate with increased disease severity.

[0961] Further studies using a PCR-based subtraction library of a prostate tumor pool subtracted against a pool of normal tissues (referred to as JP: PCR subtraction) resulted in the isolation of thirteen additional clones, seven of which did not share any significant homology to known GenBank sequences. The determined cDNA sequences for these seven clones (P711P, P712P, novel 23, P774P, P775P, P710P and P768P) are provided in SEQ ID NO: 307-311, 313 and 315, respectively. The remaining six clones (SEQ ID NO: 316 and 321-325) were shown to share some homology to known genes. By microarray analysis, all thirteen clones showed three or more fold over-expression in prostate tissues, including prostate tumors, BPH and normal prostate as compared to normal non-prostate tissues. Clones P711P, P712P, novel 23 and P768P showed over-expression in most prostate tumors and BPH tissues tested (n=29), and in the majority of normal prostate tissues (n=4), but background to low expression levels in all normal tissues. Clones P774P, P775P and P710P showed comparatively lower expression and expression in fewer prostate tumors and BPH samples, with negative to low expression in normal prostate.

[0962] Further studies led to the isolation of an extended cDNA sequence for P712P (SEQ ID NO: 552). The amino acid sequences encoded by 16 predicted open reading frames present within the sequence of SEQ ID NO: 552 are provided in SEQ ID NO: 553-568.

[0963] The full-length cDNA for P711P was obtained by employing the partial sequence of SEQ ID NO: 307 to screen a prostate cDNA library. Specifically, a directionally cloned prostate cDNA library was prepared using standard techniques. One million colonies of this library were plated onto LB/Amp plates. Nylon membrane filters were used to lift these colonies, and the cDNAs which were picked up by these filters were denatured and cross-linked to the filters by UV light. The P711P cDNA fragment of SEQ ID NO: 307 was radio-labeled and used to hybridize with these filters. Positive clones were selected, and cDNAs were prepared and sequenced using an automatic Perkin Elmer/Applied Biosystems sequencer. The determined full-length sequence of P711P is provided in SEQ ID NO: 382, with the corresponding predicted amino acid sequence being provided in SEQ ID NO: 383.

[0964] Using PCR and hybridization-based methodologies, additional cDNA sequence information was derived for two clones described above, 11-C9 and 9-F3, herein after referred to as P707P and P714P, respectively (SEQ ID NO: 333 and 334). After comparison with the most recent GenBank, P707P was found to be a splice variant of the known gene HoxB13. In contrast, no significant homologies to P714P were found. Further studies employing the sequence of SEQ ID NO: 334 as a probe in standard full-length cloning methods, resulted in an extended cDNA sequence for P714P. This sequence is provided in SEQ ID NO: 698. This sequence was found to show some homology to the gene that encodes human ribosomal L23A protein.

[0965] Clones 8-B3, P89, P98, P130 and P201 (as disclosed in U.S. Pat. application Ser. No. 09/020,956, filed Feb. 9, 1998) were found to be contained within one contiguous sequence, referred to as P705P (SEQ ID NO: 335, with the predicted amino acid sequence provided in SEQ ID NO: 336), which was determined to be a splice variant of the known gene NKX 3.1.

[0966] Further studies on P775P resulted in the isolation of four additional sequences (SEQ ID NO: 473-476) which are all splice variants of the P775P gene. The sequence of SEQ ID NO: 474 was found to contain two open reading frames (ORFs). The predicted amino acid sequences encoded by these ORFs are provided in SEQ ID NO: 477 and 478. The cDNA sequence of SEQ ID NO: 475 was found to contain an ORF which encodes the amino acid sequence of SEQ ID NO: 479. The cDNA sequence of SEQ ID NO: 473 was found to contain four ORFs. The predicted amino acid sequences encoded by these ORFs are provided in SEQ ID NO: 480-483. Additional splice variants of P775P are provided in SEQ ID NO: 593-597.

[0967] Subsequent studies led to the identification of a genomic region on chromosome 22q11.2, known as the Cat Eye Syndrome region, that contains the five prostate genes P704P, P712P, P774P, P775P and B305D. The relative location of each of these five genes within the genomic region is shown in FIG. 10. This region may therefore be associated with malignant tumors, and other potential tumor genes may be contained within this region. These studies also led to the identification of a potential open reading frame (ORF) for P775P (provided in SEQ ID NO: 533), which encodes the amino acid sequence of SEQ ID NO: 534.

[0968] Comparison of the clone of SEQ ID NO: 325 (referred to as P558S) with sequences in the GenBank and GeneSeq DNA databases showed that P558S is identical to the prostate-specific transglutaminase gene, which is known to have two forms. The full-length sequences for the two forms are provided in SEQ ID NO: 773 and 774, with the corresponding amino acid sequences being provided in SEQ ID NO: 775 and 776, respectively. The cDNA sequence of SEQ ID NO: 774 has a 15 pair base insert, resulting in a 5 amino acid insert in the corresponding amino acid sequence (SEQ ID NO: 776). This insert is not present in the sequence of SEQ ID NO: 773.

[0969] Further studies on P768P (SEQ ID NO: 315) led to the identification of the putative full-length open reading frame (ORF). The cDNA sequence of the ORF with stop codon is provided in SEQ ID NO: 907. The cDNA sequence of the ORF without stop codon is provided in SEQ ID NO: 908, with the corresponding amino acid sequence being provided in SEQ ID NO: 909. This sequence was found to show 86% identity to a rat calcium transporter protein, indicating that P768P may represent a human calcium transporter protein. The locations of transmembrane domains within P768P were predicted using the PSORT II computer algorithm. Six transmembrane domains were predicted at amino acid positions 118-134, 172-188, 211-227, 230-246, 282-298 and 348-364. The amino acid sequences of SEQ ID NO: 910-915 represent amino acids 1-134, 135-188, 189-227, 228-246, 247-298 and 299-511 of P768P, respectively.

### EXAMPLE 4

### Synthesis of Polypeptides

[0970] Polypeptides may be synthesized on a Perkin Elmer/Applied Biosystems 430A peptide synthesizer using FMOC chemistry with HPTU (O-Benzotriazole-N,N,N′,N′-tetramethyluronium hexafluorophosphate) activation. A Gly-Cys-Gly sequence may be attached to the amino terminus of the peptide to provide a method of conjugation, binding to an immobilized surface, or labeling of the peptide. Cleavage of the peptides from the solid support may be carried out using the following cleavage mixture: trifluoroacetic acid:ethanedithiol:thioanisole:water:phenol (40:1:2:2:3). After cleaving for 2 hours, the peptides may be precipitated in cold methyl-t-butyl-ether. The peptide pellets may then be dissolved in water containing 0.1% trifluoroacetic acid (TFA) and lyophilized prior to purification by C18 reverse phase HPLC. A gradient of 0%-60% acetonitrile (containing 0.1% TFA) in water (containing 0.1% TFA) may be used to elute the peptides. Following lyophilization of the pure fractions, the peptides may be characterized using electrospray or other types of mass spectrometry and by amino acid analysis.

### EXAMPLE 5

### Further Isolation and Characterization of Prostate-specific Polypeptides By PCR-based Subtraction

[0971] A cDNA library generated from prostate primary tumor mRNA as described above was subtracted with cDNA from normal prostate. The subtraction was performed using a PCR-based protocol (Clontech), which was modified to generate larger fragments. Within this protocol, tester and driver double stranded cDNA were separately digested with five restriction enzymes that recognize six-nucleotide restriction sites (M1uI, MscI, PvuII, Sa1I and StuI). This digestion resulted in an average cDNA size of 600 bp, rather than the average size of 300 bp that results from digestion with RsaI according to the Clontech protocol. This modification did not affect the subtraction efficiency. Two tester populations were then created with different adapters, and the driver library remained without adapters.

[0972] The tester and driver libraries were then hybridized using excess driver cDNA. In the first hybridization step, driver was separately hybridized with each of the two tester cDNA populations. This resulted in populations of (a) unhybridized tester cDNAs, (b) tester cDNAs hybridized to other tester cDNAs, (c) tester cDNAs hybridized to driver cDNAs and (d) unhybridized driver cDNAs. The two separate hybridization reactions were then combined, and rehybridized in the presence of additional denatured driver cDNA. Following this second hybridization, in addition to populations (a) through (d), a fifth population (e) was generated in which tester cDNA with one adapter hybridized to tester cDNA with the second adapter. Accordingly, the second hybridization step resulted in enrichment of differentially expressed sequences which could be used as templates for PCR amplification with adaptor-specific primers.

[0973] The ends were then filled in, and PCR amplification was performed using adaptor-specific primers. Only population (e), which contained tester cDNA that did not hybridize to driver cDNA, was amplified exponentially. A second PCR amplification step was then performed, to reduce background and further enrich differentially expressed sequences.

[0974] This PCR-based subtraction technique normalizes differentially expressed cDNAs so that rare transcripts that are overexpressed in prostate tumor tissue may be recoverable. Such transcripts would be difficult to recover by traditional subtraction methods.

[0975] In addition to genes known to be overexpressed in prostate tumor, seventy-seven further clones were identified. Sequences of these partial cDNAs are provided in SEQ ID NO: 29 to 305. Most of these clones had no significant homology to database sequences. Exceptions were JPTPN23 (SEQ ID NO: 231; similarity to pig valosin-containing protein), JPTPN30 (SEQ ID NO: 234; similarity to rat MRNA for proteasome subunit), JPTPN45 (SEQ ID NO: 243; similarity to rat norvegicus cytosolic NADP-dependent isocitrate dehydrogenase), JPTPN46 (SEQ ID NO: 244; similarity to human subclone H8 4 d4 DNA sequence), JP1D6 (SEQ ID NO: 265; similarity to G. gallus dynein light chain-A), JP8D6 (SEQ ID NO: 288; similarity to human BAC clone RG016J04), JP8F5 (SEQ ID NO: 289; similarity to human subclone H8 3 b5 DNA sequence), and JP8E9 (SEQ ID NO: 299; similarity to human Alu sequence).

[0976] Additional studies using the PCR-based subtraction library consisting of a prostate tumor pool subtracted against a normal prostate pool (referred to as PT-PN PCR subtraction) yielded three additional clones. Comparison of the cDNA sequences of these clones with the most recent release of GenBank revealed no significant homologies to the two clones referred to as P715P and P767P (SEQ ID NO: 312 and 314). The remaining clone was found to show some homology to the known gene KIAA0056 (SEQ ID NO: 318). Using microarray analysis to measure mRNA expression levels in various tissues, all three clones were found to be over-expressed in prostate tumors and BPH tissues. Specifically, clone P715P was over-expressed in most prostate tumors and BPH tissues by a factor of three or greater, with elevated expression seen in the majority of normal prostate samples and in fetal tissue, but negative to low expression in all other normal tissues. Clone P767P was over-expressed in several prostate tumors and BPH tissues, with moderate expression levels in half of the normal prostate samples, and background to low expression in all other normal tissues tested.

[0977] Further analysis, by microarray as described above, of the PT-PN PCR subtraction library and of a DNA subtraction library containing cDNA from prostate tumor subtracted with a pool of normal tissue cDNAs, led to the isolation of 27 additional clones (SEQ ID NO: 340-365 and 381) which were determined to be over-expressed in prostate tumor. The clones of SEQ ID NO: 341, 342, 345, 347, 348, 349, 351, 355-359, 361, 362 and 364 were also found to be expressed in normal prostate. Expression of all 26 clones in a variety of normal tissues was found to be low or undetectable, with the exception of P544S (SEQ ID NO: 356) which was found to be expressed in small intestine. Of the 26 clones, 11 (SEQ ID NO: 340-349 and 362) were found to show some homology to previously identified sequences. No significant homologies were found to the clones of SEQ ID NO: 350, 351, 353-361, and 363-365.

[0978] Comparison of the sequence of SEQ ID NO: 362 with sequences in the GenBank and GeneSeq DNA databases showed that this clone (referred to as P788P) is identical to GeneSeq Accession No. X27262, which encodes a protein found in the GeneSeq protein Accession No. Y00931. The full length cDNA sequence of P788P is shown in FIG. 12A (SEQ ID NO: 777), with the corresponding predicted amino acid being shown in FIG. 12B (SEQ ID NO: 778). Subsequently, a full-length cDNA sequence for P788P that contains polymorphisms not found in the sequence of SEQ ID NO: 779, was cloned multiple times by PCR amplification from cDNA prepared from several RNA templates from three individuals. This determined cDNA sequence of this polymorphic variant of P788P is provided in SEQ ID NO: 779, with the corresponding amino acid sequence being provided in SEQ ID NO: 780. The sequence of SEQ ID NO: 780 differs from that of SEQ ID NO: 778 by six amino acid residues. The P788P protein has 7 potential transmembrane domains at the C-terminal portion and is predicted to be a plasma membrane protein with an extracellular N-terminal region.

[0979] Further studies on the clone of SEQ ID NO: 352 (referred to as P790P) led to the isolation of the full-length cDNA sequence of SEQ ID NO: 526. The corresponding predicted amino acid is provided in SEQ ID NO: 527. Data from two quantitative PCR experiments indicated that P790P is over-expressed in 11/15 tested prostate tumor samples and is expressed at low levels in spinal cord, with no expression being seen in all other normal samples tested. Data from further PCR experiments and microarray experiments showed over-expression in normal prostate and prostate tumor with little or no expression in other tissues tested. P790P was subsequently found to show significant homology to a previously identified G-protein coupled prostate tissue receptor.

[0980] Additional studies on the clone of SEQ ID NO: 354 (referred to as P776P) led to the isolation of an extended cDNA sequence, provided in SEQ ID NO: 569. The determined cDNA sequences of three additional splice variants of P776P are provided in SEQ ID NO: 570-572. The amino acid sequences encoded by two predicted open reading frames (ORFs) contained within SEQ ID NO: 570, one predicted ORF contained within SEQ ID NO: 571, and 11 predicted ORFs contained within SEQ ID NO: 569, are provided in SEQ ID NO: 573-586, respectively. Further studies led to the isolation of the full-length sequence for the clone of SEQ ID NO: 570 (provided in SEQ ID NO: 880). Full-length cloning efforts on the clone of SEQ ID NO: 571 led to the isolation of two sequences (provided in SEQ ID NO: 881 and 882), representing a single clone, that are identical with the exception of a polymorphic insertion/deletion at position 1293. Specifically, the clone of SEQ ID NO: 882 (referred to as clone F1) has a C at position 1293. The clone of SEQ ID NO: 881 (referred to as clone F2) has a single base pair deletion at position 1293. The predicted amino acid sequences encoded by 5 open reading frames located within SEQ ID NO: 880 are provided in SEQ ID NO: 883-887, with the predicted amino acid sequences encoded by the clone of SEQ ID NO: 881 and 882 being provided in SEQ ID NO: 888-893.

[0981] Comparison of the cDNA sequences for the clones P767P (SEQ ID NO: 314) and P777P (SEQ ID NO: 350) with sequences in the GenBank human EST database showed that the two clones matched many EST sequences in common, suggesting that P767P and P777P may represent the same gene. A DNA consensus sequence derived from a DNA sequence alignment of P767P, P777P and multiple EST clones is provided in SEQ ID NO: 587. The amino acid sequences encoded by three putative ORFs located within SEQ ID NO: 587 are provided in SEQ ID NO: 588-590.

[0982] The clone of SEQ ID NO: 342 (referred to as P789P) was found to show homology to a previously identified gene. The fill length cDNA sequence for P789P and the corresponding amino acid sequence are provided in SEQ ID NO: 878 and 879, respectively.

### EXAMPLE 6

### Peptide Priming of Mice and Propagation of CTL Lines

[0983] 6.1. This Example illustrates the preparation of a CTL cell line specific for cells expressing the P502S gene.

[0984] Mice expressing the transgene for human HLA A2Kb (provided by Dr L. Sherman, The Scripps Research Institute, La Jolla, Calif,) were immunized with P2S#12 peptide (VLGWVAEL; SEQ ID NO: 306), which is derived from the P502S gene (also referred to herein as J1-17, SEQ ID NO: 8), as described by Theobald et al., Proc. Natl. Acad. Sci. USA 92:11993-11997, 1995 with the following modifications. Mice were immunized with 100μg of P2S#12 and 120μg of an I-A_{b} binding peptide derived from hepatitis B Virus protein emulsified in incomplete Freund's adjuvant. Three weeks later these mice were sacrificed and using a nylon mesh single cell suspensions prepared. Cells were then resuspended at 6×10⁶ cells/ml in complete media (RPMI-1640; Gibco BRL, Gaithersburg, Md.) containing 10% FCS, 2 mM Glutamine (Gibco BRL), sodium pyruvate (Gibco BRL), non-essential amino acids (Gibco BRL), 2×10⁻⁵ M 2-mercaptoethanol, 50 U/ml penicillin and streptomycin, and cultured in the presence of irradiated (3000 rads) P2S#12-pulsed (5 mg/ml P2S#12 and 10 mg/ml β2-microglobulin) LPS blasts (A2 transgenic spleens cells cultured in the presence of 7 μg/ml dextran sulfate and 2.5 μg/ml LPS for 3 days). Six days later, cells (5×10⁵/ml) were restimulated with 2.5×10⁶/ml peptide pulsed irradiated (20,000 rads) EL4A2Kb cells (Sherman et al, Science 258:815-818, 1992) and 3×10⁶/ml A2 transgenic spleen feeder cells. Cells were cultured in the presence of 20U/ml IL-2. Cells continued to be restimulated on a weekly basis as described, in preparation for cloning the line.

[0985] P2S#12 line was cloned by limiting dilution analysis with peptide pulsed EL4 A2Kb tumor cells (1×10⁴ cells/well) as stimulators and A2 transgenic spleen cells as feeders (5×10⁵ cells/well) grown in the presence of 30 U/ml IL-2. On day 14, cells were restimulated as before. On day 21, clones that were growing were isolated and maintained in culture. Several of these clones demonstrated significantly higher reactivity (lysis) against human fibroblasts (HLA A2Kb expressing) transduced with P502S than against control fibroblasts. An example is presented in FIG. 1.

[0986] This data indicates that P2S #12 represents a naturally processed epitope of the P502S protein that is expressed in the context of the human HLA A2Kb molecule.

[0987] 6.2. This Example illustrates the preparation of murine CTL lines and CTL clones specific for cells expressing the P501S gene.

[0988] This series of experiments were performed similarly to that described above. Mice were immunized with the P1S#10 peptide (SEQ ID NO: 337), which is derived from the P501S gene (also referred to herein as L1-12, SEQ ID NO: 110). The P1S#10 peptide was derived by analysis of the predicted polypeptide sequence for P501S for potential HLA-A2 binding sequences as defined by published HLA-A2 binding motifs (Parker, K C, et al, J. Immunol., 152:163, 1994). P1S#10 peptide was synthesized as described in Example 4, and empirically tested for HLA-A2 binding using a T cell based competition assay. Predicted A2 binding peptides were tested for their ability to compete HLA-A2 specific peptide presentation to an HLA-A2 restricted CTL clone (D150M58), which is specific for the HLA-A2 binding influenza matrix peptide fluM58. D150M58 CTL secretes TNF in response to self-presentation of peptide fluM58. In the competition assay, test peptides at 100-200 μg/ml were added to cultures of D150M58 CTL in order to bind HLA-A2 on the CTL. After thirty minutes, CTL cultured with test peptides, or control peptides, were tested for their antigen dose response to the fluM58 peptide in a standard TNF bioassay. As shown in FIG. 3, peptide P1S#10 competes HLA-A2 restricted presentation of fluM58, demonstrating that peptide P1S#10 binds HLA-A2.

[0989] Mice expressing the transgene for human HLA A2Kb were immunized as described by Theobald et al. (Proc. Natl. Acad. Sci. USA 92:11993-11997, 1995) with the following modifications. Mice were immunized with 62.5 μg of P1S #10 and 120 μg of an I-A^{b} binding peptide derived from Hepatitis B Virus protein emulsified in incomplete Freund's adjuvant. Three weeks later these mice were sacrificed and single cell suspensions prepared using a nylon mesh. Cells were then resuspended at 6×10⁶ cells/ml in complete media (as described above) and cultured in the presence of irradiated (3000 rads) P1S#10-pulsed (2 μg/ml P1S#10 and 10 mg/ml β2-microglobulin) LPS blasts (A2 transgenic spleens cells cultured in the presence of 7 μg/ml dextran sulfate and 25 μg/ml LPS for 3 days). Six days later cells (5×10⁵/ml) were restimulated with 2.5×10⁶/ml peptide-pulsed irradiated (20,000 rads) EL4A2Kb cells, as described above, and 3×10⁶/ml A2 transgenic spleen feeder cells. Cells were cultured in the presence of 20 U/ml IL-2. Cells were restimulated on a weekly basis in preparation for cloning. After three rounds of in vitro stimulations, one line was generated that recognized P1S#10-pulsed Jurkat A2Kb targets and P501S-transduced Jurkat targets as shown in FIG. 4.

[0990] A P1S#10-specific CTL line was cloned by limiting dilution analysis with peptide pulsed EL4 A2Kb tumor cells (1×10⁴ cells/well) as stimulators and A2 transgenic spleen cells as feeders (5×10⁵ cells/well) grown in the presence of 30 U/ml IL-2. On day 14, cells were restimulated as before. On day 21, viable clones were isolated and maintained in culture. As shown in FIG. 5, five of these clones demonstrated specific cytolytic reactivity against P501S-transduced Jurkat A2Kb targets. This data indicates that P1S#10 represents a naturally processed epitope of the P501S protein that is expressed in the context of the human HLA-A2.1 molecule.

### EXAMPLE 7

### Priming of CTL In Vivo Using Naked DNA Immunization with a Prostate Antigen

[0991] The prostate-specific antigen L1-12, as described above, is also referred to as P501S. HLA A2Kb Tg mice (provided by Dr L. Sherman, The Scripps Research Institute, La Jolla, Calif.) were immunized with 100 μg P501S in the vector VR1012 either intramuscularly or intradermally. The mice were immunized three times, with a two week interval between immunizations. Two weeks after the last immunization, immune spleen cells were cultured with Jurkat A2Kb-P501S transduced stimulator cells. CTL lines were stimulated weekly. After two weeks of in vitro stimulation, CTL activity was assessed against P501S transduced targets. Two out of 8 mice developed strong anti-P501S CTL responses. These results demonstrate that P501S contains at least one naturally processed HLA-A2-restricted CTL epitope.

### EXAMPLE 8

### Ability of Human T Cells to Recognize Prostate-specific Polypeptides

[0992] This Example illustrates the ability of T cells specific for a prostate tumor polypeptide to recognize human tumor.

[0993] Human CD8⁺ T cells were primed in vitro to the P2S-12 peptide (SEQ ID NO: 306) derived from P502S (also referred to as J1-17) using dendritic cells according to the protocol of Van Tsai et al. (Critical Reviews in Immunology 18:65-75, 1998). The resulting CD8⁺ T cell microcultures were tested for their ability to recognize the P2S-12 peptide presented by autologous fibroblasts or fibroblasts which were transduced to express the P502S gene in a γ-interferon ELISPOT assay (see Lalvani et al., J. Exp. Med. 186:859-865, 1997). Briefly, titrating numbers of T cells were assayed in duplicate on 104 fibroblasts in the presence of 3 μg/ml human β₂-microglobulin and 1 μg/ml P2S-12 peptide or control E75 peptide. In addition, T cells were simultaneously assayed on autologous fibroblasts transduced with the P502S gene or as a control, fibroblasts transduced with HER-2/neu. Prior to the assay, the fibroblasts were treated with 10 ng/ml γ-interferon for 48 hours to upregulate class I MHC expression. One of the microcultures (#5) demonstrated strong recognition of both peptide pulsed fibroblasts as well as transduced fibroblasts in a γ-interferon ELISPOT assay. FIG. 2A demonstrates that there was a strong increase in the number of γ-interferon spots with increasing numbers of T cells on fibroblasts pulsed with the P2S-12 peptide (solid bars) but not with the control E75 peptide (open bars). This shows the ability of these T cells to specifically recognize the P2S-12 peptide. As shown in FIG. 2B, this microculture also demonstrated an increase in the number of γ-interferon spots with increasing numbers of T cells on fibroblasts transduced to express the P502S gene but not the HER-2/neu gene. These results provide additional confirmatory evidence that the P2S-12 peptide is a naturally processed epitope of the P502S protein. Furthermore, this also demonstrates that there exists in the human T cell repertoire, high affinity T cells which are capable of recognizing this epitope. These T cells should also be capable of recognizing human tumors which express the P502S gene.

### EXAMPLE 9

### Elicitation of Prostate Antigen-specific CTL Responses in Human Blood

[0994] This Example illustrates the ability of a prostate-specific antigen to elicit a CTL response in blood of normal humans.

[0995] Autologous dendritic cells (DC) were differentiated from monocyte cultures derived from PBMC of normal donors by growth for five days in RPMI medium containing 10% human serum, 50 ng/ml GMCSF and 30 ng/ml IL-4. Following culture, DC were infected overnight with recombinant P501S-expressing vaccinia virus at an M.O.I. of 5 and matured for 8 hours by the addition of 2 micrograms/ml CD40 ligand. Virus was inactivated by UV irradiation, CD8⁺cells were isolated by positive selection using magnetic beads, and priming cultures were initiated in 24-well plates. Following five stimulation cycles using autologous fibroblasts retrovirally transduced to express P501S and CD80, CD8+lines were identified that specifically produced interferon-gamma when stimulated with autologous P501S-transduced fibroblasts. The P501S-specific activity of cell line 3A-1 could be maintained following additional stimulation cycles on autologous B-LCL transduced with P501S. Line 3A-1 was shown to specifically recognize autologous B-LCL transduced to express P501S, but not EGFP-transduced autologous B-LCL, as measured by cytotoxicity assays (⁵¹Cr release) and interferon-gamma production (Interferon-gamma Elispot; see above and Lalvani et al., J. Exp. Med. 186:859-865, 1997). The results of these assays are presented in FIGS. 6A and 6B.

### EXAMPLE 10

### Identification of a Naturally Processed CTL Epitope Contained within the Prostate-specific Antigen P703P

[0996] The 9-mer peptide p5 (SEQ ID NO: 338) was derived from the P703P antigen (also referred to as P20). The p5 peptide is immunogenic in human HLA-A2 donors and is a naturally processed epitope. Antigen specific human CD8+T cells can be primed following repeated in vitro stimulations with monocytes pulsed with p5 peptide. These CTL specifically recognize p5-pulsed and P703P-transduced target cells in both ELISPOT (as described above) and chromium release assays. Additionally, immunization of HLA-A2Kb transgenic mice with p5 leads to the generation of CTL lines which recognize a variety of HLA-A2Kb or HLA-A2 transduced target cells expressing P703P.

[0997] Initial studies demonstrating that p5 is a naturally processed epitope were done using HLA-A2Kb transgenic mice. HLA-A2Kb transgenic mice were immunized subcutaneously in the footpad with 100 μg of p5 peptide together with 140 μg of hepatitis B virus core peptide (a Th peptide) in Freund's incomplete adjuvant. Three weeks post immunization, spleen cells from immunized mice were stimulated in vitro with peptide-pulsed LPS blasts. CTL activity was assessed by chromium release assay five days after primary in vitro stimulation. Retrovirally transduced cells expressing the control antigen P703P and HLA-A2Kb were used as targets. CTL lines that specifically recognized both p5-pulsed targets as well as P703P-expressing targets were identified.

[0998] Human in vitro priming experiments demonstrated that the p5 peptide is immunogenic in humans. Dendritic cells (DC) were differentiated from monocyte cultures derived from PBMC of normal human donors by culturing for five days in RPMI medium containing 10% human serum, 50 ng/ml human GM-CSF and 30 ng/ml human IL-4. Following culture, the DC were pulsed with 1 ug/ml p5 peptide and cultured with CD8+ T cell enriched PBMC. CTL lines were restimulated on a weekly basis with p5-pulsed monocytes. Five to six weeks after initiation of the CTL cultures, CTL recognition of p5-pulsed target cells was demonstrated. CTL were additionally shown to recognize human cells transduced to express P703P, demonstrating that p5 is a naturally processed epitope.

[0999] Studies identifying a further peptide epitope (referred to as peptide 4) derived from the prostate tumor-specific antigen P703P that is capable of being recognized by CD4 T cells on the surface of cells in the context of HLA class II molecules were carried out as follows. The amino acid sequence for peptide 4 is provided in SEQ ID NO: 781, with the corresponding cDNA sequence being provided in SEQ ID NO: 782.

[1000] Twenty 15-mer peptides overlapping by 10 amino acids and derived from the carboxy-terminal fragment of P703P were generated using standard procedures. Dendritic cells (DC) were derived from PBMC of a normal female donor using GM-CSF and IL-4 by standard protocols. CD4 T cells were generated from the same donor as the DC using MACS beads and negative selection. DC were pulsed overnight with pools of the 15-mer peptides, with each peptide at a final concentration of 0.25 microgram/ml. Pulsed DC were washed and plated at 1×10⁴ cells/well of 96-well V-bottom plates and purified CD4 T cells were added at 1×10⁵/well. Cultures were supplemented with 60 ng/ml IL-6 and 10 ng/ml IL-12 and incubated at 37° C. Cultures were restimulated as above on a weekly basis using DC generated and pulsed as above as antigen presenting cells, supplemented with 5 ng/ml IL-7 and 10 u/ml IL-2. Following 4 in vitro stimulation cycles, 96 lines (each line corresponding to one well) were tested for specific proliferation and cytokine production in response to the stimulating pools with an irrelevant pool of peptides derived from mammaglobin being used as a control.

[1001] One line (referred to as 1-F9) was identified from pool #1 that demonstrated specific proliferation (measured by 3H proliferation assays) and cytokine production (measured by interferon-gamma ELISA assays) in response to pool #1 of P703P peptides. This line was further tested for specific recognition of the peptide pool, specific recognition of individual peptides in the pool, and in HLA mismatch analyses to identify the relevant restricting allele. Line 1-F9 was found to specifically proliferate and produce interferon-gamma in response to peptide pool #1, and also to peptide 4 (SEQ ID NO: 781). Peptide 4 corresponds to amino acids 126-140 of SEQ ID NO: 327. Peptide titration experiments were conducted to assess the sensitivity of line 1-F9 for the specific peptide. The line was found to specifically respond to peptide 4 at concentrations as low as 0.25 ng/ml, indicating that the T cells are very sensitive and therefore likely to have high affinity for the epitope.

[1002] To determine the HLA restriction of the P703P response, a panel of antigen presenting cells (APC) was generated that was partially matched with the donor used to generate the T cells. The APC were pulsed with the peptide and used in proliferation and cytokine assays together with line 1-F9. APC matched with the donor at HLA-DRB0701 and HLA-DQB02 alleles were able to present the peptide to the T cells, indicating that the P703P-specific response is restricted to one of these alleles.

[1003] Antibody blocking assays were utilized to determine if the restricting allele was HLA-DR0701 or HLA-DQ02. The anti-HLA-DR blocking antibody L243 or an irrelevant isotype matched IgG2a were added to T cells and APC cultures pulsed with the peptide RMPTVLQCVNVSVVS (SEQ ID NO: 781) at 250 ng/ml. Standard interferon-gamma and proliferation assays were performed. Whereas the control antibody had no effect on the ability of the T cells to recognize peptide-pulsed APC, in both assays the anti-HLA-DR antibody completely blocked the ability of the T cells to specifically recognize peptide-pulsed APC.

[1004] To determine if the peptide epitope RMPTVLQCVNVSVVS (SEQ ID NO: 781) was naturally processed, the ability of line 1-F9 to recognize APC pulsed with recombinant P703P protein was examined. For these experiments a number of recombinant P703P sources were utilized; E. coli-derived P703P, Pichia-derived P703P and baculovirus-derived P703P. Irrelevant protein controls used were E. coli-derived L3E a lung-specific antigen) and baculovirus-derived mammaglobin. In interferon-gamma ELISA assays, line 1-F9 was able to efficiently recognize both E. coli forms of P703P as well as Pichia-derived recombinant P703P, while baculovirus-derived P703P was recognized less efficiently. Subsequent Western blot analysis revealed that the E coli and Pichia P703P protein preparations were intact while the baculovirus P703P preparation was approximately 75% degraded. Thus, peptide RMPTVLQCVNVSVVS (SEQ ID NO: 781) from P703P is a naturally processed peptide epitope derived from P703P and presented to T cells in the context of HLA-DRB-0701.

[1005] In further studies, twenty-four 15-mer peptides overlapping by 10 amino acids and derived from the N-terminal fragment of P703P (corresponding to amino acids 27-154 of SEQ ID NO: 525) were generated by standard procedures and their ability to be recognized by CD4 cells was determined essentially as described above. DC were pulsed overnight with pools of the peptides with each peptide at a final concentration of 10 microgram/ml. A large number of individual CD4 T cell lines (65/480) demonstrated significant proliferation and cytokine release (IFN-gamma) in response to the P703P peptide pools but not to a control peptide pool. The CD4 T cell lines which demonstrated specific activity were restimulated on the appropriate pool of P703P peptides and reassayed on the individual peptides of each pool as well as a peptide dose titration of the pool of peptides in a IFN-gamma release assay and in a proliferation assay.

[1006] Sixteen immunogenic peptides were recognized by the T cells from the entire set of peptide antigens tested. The amino acid sequences of these peptides are provided in SEQ ID NO: 799-814, with the corresponding cDNA sequences being provided in SEQ ID NO: 783-798, respectively. In some cases the peptide reactivity of the T cell line could be mapped to a single peptide, however some could be mapped to more than one peptide in each pool. Those CD4 T cell lines that displayed a representative pattern of recognition from each peptide pool with a reasonable affinity for peptide were chosen for further analysis (I-1A, −6A; II-4C, −5E; III-6E, IV-4B, −3F, −9B, −10F, V-5B, −4D, and −10F). These CD4 T cells lines were restimulated on the appropriate individual peptide and reassayed on autologous DC pulsed with a truncated form of recombinant P703P protein made in E. coli (a.a. 96-254 of SEQ ID NO: 525), full-length P703P made in the baculovirus expression system, and a fusion between influenza virus NS1 and P703P made in E. coli. Of the T cell lines tested, line I-1A recognized specifically the truncated form of P703P (E. coli) but no other recombinant form of P703P. This line also recognized the peptide used to elicit the T cells. Line 2-4C recognized the truncated form of P703P (E. coli) and the full length form of P703P made in baculovirus, as well as peptide. The remaining T cell lines tested were either peptide-specific only (II-5E, II-6F, IV-4B, IV-3F, IV-9B, IV-10F, V-5B and V-4D) or were non-responsive to any antigen tested (V-10F). These results demonstrate that the peptide sequence RPLLANDLMLIKLDE (SEQ ID NO: 814; corresponding to a.a. 110-124 of SEQ ID NO: 525) recognized by the T cell line I-1A, and the peptide sequences SVSESDTIRSISIAS (SEQ ID NO: 811; corresponding to a.a. 125-139 of SEQ ID NO: 525) and ISIASQCPTAGNSCL (SEQ ID NO: 810; corresponding to a.a. 135-149 of SEQ ID NO: 525) recognized by the T cell line II-4C may be naturally processed epitopes of the P703P protein.

[1007] In further studies, forty 15-mer peptides overlapping by 10 amino acids and derived spanning amino acids 47 to 254 of P703P (SEQ ID NO: 525) were generated by standard procedures and their ability to be recognized by CD4 cells was determined essentially as described above. DC were prepared from PBMC of a donor having distinct HLA DR and DQ alleles from that used in previous experiments. DC were pulsed overnight with pools of the peptides with each peptide at a final concentration of 0.25 microgram/ml, and each pool containing 10 peptides. Twelve lines were identified that demonstrated specific proliferation and cytokine production (measured in gamma-interferon ELISA assays) in response to the stimulating peptide pool. These lines were further tested for specific recognition of the peptide pool, specific recognition of individual peptides in the pool, and specific recognition of recombinant P703P protein. Lines 3A5H and 3A9H specifically proliferated and produced gamma-interferon in response to recombinant protein and one individual peptide as well as the peptide pool. Following re-stimulation on targets loaded with the specific peptide, only 3A9H responded specifically to targets exposed to lysates of fibroblasts infected adenovirus expressing full-length P703P. These results indicates that the line 3A9H can respond to antigenic peptide derived from protein synthesized in manunalian cells. The peptide to which the specific CD4 line responded correspond to amino acids 155-170 of P703P (SEQ ID NO: 943). The DNA sequence for this peptide is provided in SEQ ID NO: 942.

### EXAMPLE 11

### Expression of a Breast Tumor-derived Antigen in Prostate

[1008] Isolation of the antigen B305D from breast tumor by differential display is described in U.S. patent application Ser. No. 08/700,014, filed Aug. 20, 1996. Several different splice forms of this antigen were isolated. The determined cDNA sequences for these splice forms are provided in SEQ ID NO: 366-375, with the predicted amino acid sequences corresponding to the sequences of SEQ ID NO: 292, 298 and 301-303 being provided in SEQ ID NO: 299-306, respectively. In further studies, a splice variant of the cDNA sequence of SEQ ID NO: 366 was isolated which was found to contain an additional guanine residue at position 884 (SEQ ID NO: 530), leading to a frameshift in the open reading frame. The determined DNA sequence of this ORF is provided in SEQ ID NO: 531. This frameshift generates a protein sequence (provided in SEQ ID NO: 532) of 293 amino acids that contains the C-terminal domain common to the other isoforms of B305D but that differs in the N-terrninal region.

[1009] The expression levels of B305D in a variety of tumor and normal tissues were examined by real time PCR and by Northern analysis. The results indicated that B305D is highly expressed in breast tumor, prostate tumor, normal prostate and normal testes, with expression being low or undetectable in all other tissues examined (colon tumor, lung tumor, ovary tumor, and normal bone marrow, colon, kidney, liver, lung, ovary, skin, small intestine, stomach). Using real-time PCR on a panel of prostate tumors, expression of B305D in prostate tumors was shown to increase with increasing Gleason grade, demonstrating that expression of B305D increases as prostate cancer progresses.

### EXAMPLE 12

### Generation of Human CTL In Vitro Using Whole Gene Priming and Stimulation Techniques with the Prostate-specific Antigen P501S

[1010] Using in vitro whole-gene priming with P501S-vaccinia infected DC (see, for example, Yee et al, The Journal of Immunology, 157(9):4079-86, 1996), human CTL lines were derived that specifically recognize autologous fibroblasts transduced with P501S (also known as L1-12), as determined by interferon-γ ELISPOT analysis as described above. Using a panel of HLA-mismatched B-LCL lines transduced with P501S, these CTL lines were shown to be likely restricted to HLAB class I allele. Specifically, dendritic cells (DC) were differentiated from monocyte cultures derived from PBMC of normal human donors by growing for five days in RPMI medium containing 10% human serum, 50 ng/ml human GM-CSF and 30 ng/ml human IL-4. Following culture, DC were infected overnight with recombinant P501S vaccinia virus at a multiplicity of infection (M.O.I) of five, and matured overnight by the addition of 3 μg/ml CD40 ligand. Virus was inactivated by UV irradiation. CD8+ T cells were isolated using a magnetic bead system, and priming cultures were initiated using standard culture techniques. Cultures were restimulated every 7-10 days using autologous primary fibroblasts retrovirally transduced with P501S and CD80. Following four stimulation cycles, CD8+ T cell lines were identified that specifically produced interferon-γ when stimulated with P501S and CD80-transduced autologous fibroblasts. A panel of HLA-mismatched B-LCL lines transduced with P501S were generated to define the restriction allele of the response. By measuring interferon-γ in an ELISPOT assay, the P501S specific response was shown to be likely restricted by HLA B alleles. These results demonstrate that a CD8+ CTL response to P501S can be elicited.

[1011] To identify the epitope(s) recognized, cDNA encoding P501S was fragmented by various restriction digests, and sub-cloned into the retroviral expression vector pBIB-KS. Retroviral supernatants were generated by transfection of the helper packaging line Phoenix-Ampho. Supernatants were then used to transduce Jurkat/A2Kb cells for CTL screening. CTL were screened in IFN-gamma ELISPOT assays against these A2Kb targets transduced with the “library” of P501S fragments. Initial positive fragments P501S/H3 and P501S/F2 were sequenced and found to encode amino acids 106-553 and amino acids 136-547, respectively, of SEQ ID NO: 113. A truncation of H3 was made to encode amino acid residues 106-351 of SEQ ID NO: 113, which was unable to stimulate the CTL, thus localizing the epitope to amino acid residues 351-547. Additional fragments encoding amino acids 1-472 (Fragment A) and amino acids 1-351 (Fragment B) were also constructed. Fragment A but not Fragment B stimulated the CTL thus localizing the epitope to amino acid residues 351-472. Overlapping 20-mer and 18-mer peptides representing this region were tested by pulsing Jurkat/A2Kb cells versus CTL in an IFN-gamma assay. Only peptides P501S-369(20) and P501S-369(18) stimulated the CTL. Nine-mer and 10-mer peptides representing this region were synthesized and similarly tested. Peptide P501S-370 (SEQ ID NO: 539) was the minimal 9-mer giving a strong response. Peptide P501S-376 (SEQ ID NO: 540) also gave a weak response, suggesting that it might represent a cross-reactive epitope.

[1012] In subsequent studies, the ability of primary human B cells transduced with P501S to prime MHC class I-restricted, P501S-specific, autologous CD8 T cells was examined. Primary B cells were derived from PBMC of a homozygous HLA-A2 donor by culture in CD40 ligand and IL-4, transduced at high frequency with recombinant P501S in the vector pBIB, and selected with blastocidin-S. For in vitro priming, purified CD8+ T cells were cultured with autologous CD40 ligand +IL-4 derived, P501S-transduced B cells in a 96-well microculture format. These CTL microcultures were re-stimulated with P501S-transduced B cells and then assayed for specificity. Following this initial screen, microcultures with significant signal above background were cloned on autologous EBV-transformed B cells (BLCL), also transduced with P501S. Using IFN-gamma ELISPOT for detection, several of these CD8 T cell clones were found to be specific for P501S, as demonstrated by reactivity to BLCL/P501S but not BLCL transduced with control antigen. It was further demonstrated that the anti-P501S CD8 T cell specificity is HLA-A2-restricted. First, antibody blocking experiments with anti-HLA-A,B,C monoclonal antibody (W6.32), anti-HLA-B,C monoclonal antibody (B1.23.2) and a control monoclonal antibody showed that only the anti-HLA-A,B,C antibody blocked recognition of P501S-expressing autologous BLCL. Secondly, the anti-P501S CTL also recognized an HLA-A2 matched, heterologous BLCL transduced with P501S, but not the corresponding EGFP transduced control BLCL.

[1013] A naturally processed, CD8, class I-restricted peptide epitope of P501S was identified as follows. Dendritic Cells (DC) were isolated by Percol gradient followed by differential adherence, and cultured for 5 days in the presence of RPMI medium containing 1% human serum, 50ng/ml GM-CSF and 30ng/ml IL-4. Following culture, DC were infected for 24 hours with P501S-expressing adenovirus at an MOI of 10 and matured for an additional 24 hours by the addition of 2ug/ml CD40 ligand. CD8 cells were enriched for by the subtraction of CD4+, CD14+ and CD16+ populations from PBMC with magnetic beads. Priming cultures containing 10,000 P501S-expressing DC and 100,000 CD8+ T cells per well were set up in 96-well V-bottom plates with RPMI containing 10% human serum, 5 ng/ml L-12 and 10 ng/ml IL-6. Cultures were stimulated every 7 days using autologous fibroblasts retrovirally transduced to express P501S and CD80, and were treated with IFN-gamma for 48-72 hours to upregulate MHC Class I expression. 10 u/ml IL-2 was added at the time of stimulation and on days 2 and 5 following stimulation. Following 4 stimulation cycles, one P501S-specific CD8+ T cell line (referred to as 2A2) was identified that produced IFN-gamma in response to IFN-gamma-treated P501S/CD80 expressing autologous fibroblasts, but not in response to IFN-gamma-treated P703P/CD80 expressing autologous fibroblasts in a γ-IFN Elispot assay. Line 2A2 was cloned in 96-well plates with 0.5 cell/well or 2 cells/well in the presence of 75,000 PBMC/well, 10,000 B-LCL/well, 30 ng/ml OKT3 and 50 u/ml IL-2. Twelve clones were isolated that showed strong P501S specificity in response to transduced fibroblasts.

[1014] Fluorescence activated cell sorting (FACS) analysis was performed on P501S-specific clones using CD3-, CD4- and CD8-specific antibodies conjugated to PercP, FITC and PE respectively. Consistent with the use of CD8 enriched T cells in the priming cultures, P5401 S-specific clones were determined to be CD3+, CD8+ and CD4−.

[1015] To identify the relevant P501S epitope recognized by P501S specific CTL, pools of 18-20 mer or 30-mer peptides that spanned the majority of the amino acid sequence of P501S were loaded onto autologous B-LCL and tested in γ-IFN Elispot assays for the ability to stimulate two P501S-specific CTL clones, referred to as 4E5 and 4E7. One pool, composed of five 18-20 mer peptides that spanned amino acids 411-486 of P501S (SEQ ID NO: 113), was found to be recognized by both P501S-specific clones. To identify the specific 18-20 mer peptide recognized by the clones, each of the 18-20 mer peptides that comprised the positive pool were tested individually in γ-IFN Elispot assays for the ability to stimulate the two P501S-specific CTL clones, 4E5 and 4E7. Both 4E5 and 4E7 specifically recognized one 20-mer peptide (SEQ ID NO: 853; cDNA sequence provided in SEQ ID NO: 854) that spanned amino acids 453-472 of P501S. Since the minimal epitope recognized by CD8+ T cells is almost always either a 9 or 10-mer peptide sequence, 10-mer peptides that spanned the entire sequence of SEQ ID NO: 853 were synthesized that differed by 1 amino acid. Each of these 10-mer peptides was tested for the ability to stimulate two P501S-specific clones, (referred to as 1D5 and 1E12). One 10-mer peptide (SEQ ID NO: 855; cDNA sequence provided in SEQ ID NO: 856) was identified that specifically stimulated the P501S-specific clones. This epitope spans amino acids 463-472 of P501S. This sequence defines a minimal 10-mer epitope from P501S that can be naturally processed and to which CTL responses can be identified in normal PBMC. Thus, this epitope is a candidate for use as a vaccine moiety, and as a therapeutic and/or diagnostic reagent for prostate cancer.

[1016] To identify the class I restriction element for the P501S-derived sequence of SEQ ID NO: 855, HLA blocking and mismatch analyses were performed. In γ-IFN Elispot assays, the specific response of clones 4A7 and 4E5 to P501S-transduced autologous fibroblasts was blocked by pre-incubation with 25 ug/ml W6/32 (pan-Class I blocking antibody) and B1.23.2 (HLA-B/C blocking antibody). These results demonstrate that the SEQ ID NO: 855-specific response is restricted to an HLA-B or HLA-C allele.

[1017] For the HLA mismatch analysis, autologous B-LCL (HLA-A1,A2,B8,B51, Cw1, Cw7) and heterologous B-LCL (HLA-A2,A3,B18,B51,Cw5,Cw4) that share the HLAB51 allele were pulsed for one hour with 20 ug/ml of peptide of SEQ ID NO: 855, washed, and tested in γ-IFN Elispot assays for the ability to stimulate clones 4A7 and 4E5. Antibody blocking assays with the B1.23.2 (HLA-B/C blocking antibody) were also performed. SEQ ID NO: 855-specific response was detected using both the autologous (D326) and heterologous (D107) B-LCL, and furthermore the responses were blocked by pre-incubation with 25 ug/ml of B1.23.2 HLA-B/C blocking antibody. Together these results demonstrate that the P501S-specific response to the peptide of SEQ ID NO: 855 is restricted to the HLA-B51 class I allele. Molecular cloning and sequence analysis of the HLA-B51 allele from D3326 revealed that the HLA-B51 subtype of D326 is HLA-B51011.

[1018] Based on the 10-mer P501S-derived epitope of SEQ ID NO: 855, two 9-mers with the sequences of SEQ ID NO: 857 and 858 were synthesized and tested in Elispot assays for the ability to stimulate two P501S-specific CTL clones derived from line 2A2. The 10-mer peptide of SEQ ID NO: 855, as well as the 9-mer peptide of SEQ ID NO: 858, but not the 9-mer peptide of SEQ ID NO: 857, were capable of stimulating the P501S-specific CTL to produce IFN-gamma. These results demonstrate that the peptide of SEQ ID NO: 858 is a 9-mer P501S-derived epitope recognized by P501S-specific CTL. The DNA sequence encoding the epitope of SEQ ID NO: 858 is provided in SEQ ID NO: 859.

[1019] To identify the class I restricting allele for the P501S-derived peptide of SEQ ID NO: 855 and 858 specific response, each of the HLA B and C alleles were cloned from the donor used in the in vitro priming experiment. Sequence analysis indicated that the relevant alleles were HLA-B8, HLA-B51, HLA-Cw01 and HLA-Cw07. Each of these alleles were subcloned into an expression vector and co-transfected together with the P501S gene into VA-13 cells. Transfected VA-13 cells were then tested for the ability to specifically stimulate the P501S-specific CTL in ELISPOT assays. VA-13 cells transfected with P501S and HLA-B51 were capable of stimulating the P501S-specific CTL to secrete gamma-IFN. VA-13 cells transfected with HLA-B51 alone or P501S +the other HLA-alleles were not capable of stimulating the P501S-specific CTL. These results demonstrate that the restricting allele for the P501S-specific response is the HLAB51 allele. Sequence analysis revealed that the subtype of the relevant restricting allele is HLA-B5 1011.

[1020] To determine if the P501S-specific CTL could recognize prostate tumor cells that express P501S, the P501S-positive lines LnCAP and CRL2422 (both expressing “moderate” amounts of P501S MRNA and protein), and PC-3 (expressing low amounts of P501S mRNA and protein), plus the P501S-negative cell line DU-145 were retrovirally transduced with the HLA-B51011 allele that was cloned from the donor used to generate the P501S-specific CTL. HLA-B51011- or EGFP-transduced and selected tumor cells were treated with gamma-interferon and androgen (to upregulate stimulatory functions and P501S, respectively) and used in gamma-interferon Elispot assays with the P501S-specific CTL clones 4E5 and 4E7. Untreated cells were used as a control.

[1021] Both 4E5 and 4E7 efficiently and specifically recognized LnCAP and CRL2422 cells that were transduced with the HLA-B51011 allele, but not the same cell lines transduced with EGFP. Additionally, both CTL clones specifically recognized PC-3 cells transduced with HLA-B51011, but not the P501S-negative tumor cell line DU-145. Treatment with gamma-interferon or androgen did not enhance the ability of CTL to recognize tumor cells. These results demonstrate that P501S-specific CTL, generated by in vitro whole gene priming, specifically and efficiently recognize prostate tumor cell lines that express P501S.

[1022] A naturally processed CD4 epitope of P501S was identified as follows.

[1023] CD4 cells specific for P501S were prepared as described above. A series of 16 overlapping peptides were synthesized that spanned approximately 50% of the amino terminal portion of the P501S gene (amino acids 1- 325 of SEQ ID NO: 113). For priming, peptides were combined into pools of 4 peptides, pulsed at 4 μg/ml onto dendritic cells (DC) for 24 hours, with TNF-alpha. DC were then washed and mixed with negatively selected CD4+ T cells in 96 well U-bottom plates. Cultures were re-stimulated weekly on fresh DC loaded with peptide pools. Following a total of 4 stimulation cycles, cells were rested for an additional week and tested for specificity to APC pulsed with peptide pools using γ-IFN ELISA and proliferation assays. For these assays, adherent monocytes loaded with either the relevant peptide pool at 4 ug/ml or an irrelevant peptide at ug/ml were used as APC. T cell lines that demonstrated either specific cytokine secretion or proliferation were then tested for recognition of individual peptides that were present in the pool. T cell lines could be identified from pools A and B that recognized individual peptides from these pools.

[1024] From pool A, lines AD9 and AE10 specifically recognized peptide 1 (SEQ ID NO: 862), and line AF5 recognized peptide 39 (SEQ ID NO: 861). From pool B, line BC6 could be identified that recognized peptide 58 (SEQ ID NO: 860). Each of these lines were stimulated on the specific peptide and tested for specific recognition of the peptide in a titration assay as well as cell lysates generated by infection of HEK 293 cells with adenovirus expressing either P501S or an irrelevant antigen. For these assays, APC-adherent adherent monocytes were pulsed with either 10, 1, or 0.1 μg/ml individual P501S peptides, and DC were pulsed overnight with a 1:5 dilution of adenovirally infected cell lysates. Lines AD9, AE10 and AF5 retained significant recognition of the relevant P501S-derived peptides even at 0.1 mg/ml. Furthermore, line AD9 demonstrated significant (8.1 fold stimulation index) specific activity for lysates from adenovirus-P501S infected cells. These results demonstrate that high affinity CD4 T cell lines can be generated toward P501S-derived epitopes, and that at least a subset of these T cells specific for the P501S derived sequence of SEQ ID NO: 862 are specific for an epitope that is naturally processed by human cells. The DNA sequences encoding the amino acid sequences of SEQ ID NO: 860-862 are provided in SEQ ID NO: 863-865, respectively.

[1025] To further characterize the P501S-specific activity of AD9, the line was cloned using anti-CD3. Three clones, referred to as 1A1, 1A9 and 1F5, were identified that were specific for the P501S-1 peptide (SEQ ID NO: 862). To determine the HLA restriction allele for the P501S-specific response, each of these clones was tested in class II antibody blocking and HLA mismatch assays using proliferation and gamma-interferon assays. In antibody blocking assays and measuring gamma-interferon production using ELISA assays, the ability of all three clones to recognize peptide pulsed APC was specifically blocked by co-incubation with either a pan-class II blocking antibody or a HLA-DR blocking antibody, but not with a HLA-DQ or an irrelevant antibody. Proliferation assays performed simultaneously with the same cells confirmed these results. These data indicate that the P501S-specific response of the clones is restricted by an HLA-DR allele. Further studies demonstrated that the restricting allele for the P501S-specific response is HLA-DRB 1501.

### EXAMPLE 13

### Identification of Prostate-specific Antigens by Microarray Analysis

[1026] This Example describes the isolation of certain prostate-specific polypeptides from a prostate tumor cDNA library.

[1027] A human prostate tumor cDNA expression library as described above was screened using microarray analysis to identify clones that display at least a three fold over-expression in prostate tumor and/or normal prostate tissue, as compared to non-prostate normal tissues (not including testis). 372 clones were identified, and 319 were successfully sequenced. Table I presents a summary of these clones, which are shown in SEQ ID NOs:385-400. Of these sequences SEQ ID NOs:386, 389, 390 and 392 correspond to novel genes, and SEQ ID NOs: 393 and 396 correspond to previously identified sequences. The others (SEQ ID NOs:385, 387, 388, 391, 394, 395 and 397-400) correspond to known sequences, as shown in Table I.

Table I
Summary of Prostate Tumor Antigens

| | Previously | |
|---|---|---|
| Known Genes | Identified Genes | Novel Genes |
| T-cell gamma chain | P5045 | 23379 (SEQ ID NO:389) |
| Kallikrein | P1000C | 23399 (SEQ ID NO:392) |
| Vector | P5015 | 23320 (SEQ ID NO:386) |
| CGI-82 protein mRNA | P503S | 23381 (SEQ ID NO:390) |
| (23319; SEQ ID | | |
| NO:385) | | |
| PSA | P510S | |
| Ald. 6 Dehyd. | P784P | |
| L-iditol-2 | P502S | |
| dehydrogenase | | |
| (23376; SEQ ID | | |
| NO:388) | | |
| Ets transcription | P706P | |
| factor PDEF (22672; | | |
| SEQ ID NO :398) | | |
| hTGR (22678; | 19142.2, bangur.seq | |
| SEQ ID NO:399) | (22621; SEQ ID | |
| | NO:396) | |
| KIAA0295 | 5566.1 Wang | |
| (22685; SEQ ID | (23404; SEQ ID | |
| NO:400) | NO:393) | |
| Prostatic Acid | P712P | |
| Phosphatase (22655; | | |
| SEQ ID NO:397) | | |
| transglutaminase | P778P | |
| (22611; SEQ ID | | |
| NO:395) | | |
| HDLBP (23508; | | |
| SEQ ID NO:394) | | |
| CGI-69 Protein | | |
| (23367; SEQ ID | | |
| NO:387) | | |
| KIAA0122 | | |
| (23383; SEQ ID | | |
| NO:391) | | |
| TEEG | | |

[1028] CGI-82 showed 4.06 fold over-expression in prostate tissues as compared to other normal tissues tested. It was over-expressed in 43% of prostate tumors, 25% normal prostate, not detected in other normal tissues tested. L-iditol-2 dehydrogenase showed 4.94 fold over-expression in prostate tissues as compared to other normal tissues tested. It was over-expressed in 90% of prostate tumors, 100% of normal prostate, and not detected in other normal tissues tested. Ets transcription factor PDEF showed 5.55 fold over-expression in prostate tissues as compared to other normal tissues tested. It was over-expressed in 47% prostate tumors, 25% normal prostate and not detected in other normal tissues tested. hTGR1 showed 9.11 fold over-expression in prostate tissues as compared to other normal tissues tested. It was over-expressed in 63% of prostate tumors and is not detected in normal tissues tested including normal prostate. KIAA0295 showed 5.59 fold over-expression in prostate tissues as compared to other normal tissues tested. It was over-expressed in 47% of prostate tumors, low to undetectable in normal tissues tested including normal prostate tissues. Prostatic acid phosphatase showed 9.14 fold over-expression in prostate tissues as compared to other normal tissues tested. It was over-expressed in 67% of prostate tumors, 50% of normal prostate, and not detected in other normal tissues tested. Transglutaminase showed 14.84 fold over-expression in prostate tissues as compared to other normal tissues tested. It was over-expressed in 30% of prostate tumors, 50% of normal prostate, and is not detected in other normal tissues tested. High density lipoprotein binding protein (HDLBP) showed 28.06 fold over-expression in prostate tissues as compared to other normal tissues tested. It was over-expressed in 97% of prostate tumors, 75% of normal prostate, and is undetectable in all other normal tissues tested. CGI-69 showed 3.56 fold over-expression in prostate tissues as compared to other normal tissues tested. It is a low abundant gene, detected in more than 90% of prostate tumors, and in 75% normal prostate tissues. The expression of this gene in normal tissues was very low. KIAA0122 showed 4.24 fold over-expression in prostate tissues as compared to other normal tissues tested. It was over-expressed in 57% of prostate tumors, it was undetectable in all normal tissues tested including normal prostate tissues. 19142.2 bangur showed 23.25 fold over-expression in prostate tissues as compared to other normal tissues tested. It was over-expressed in 97% of prostate tumors and 100% of normal prostate. It was undetectable in other normal tissues tested. 5566.1 Wang showed 3.31 fold over-expression in prostate tissues as compared to other normal tissues tested. It was over-expressed in 97% of prostate tumors, 75% normal prostate and was also over-expressed in normal bone marrow, pancreas, and activated PBMC. Novel clone 23379 (also referred to as P553S) showed 4.86 fold over-expression in prostate tissues as compared to other normal tissues tested. It was detectable in 97% of prostate tumors and 75% normal prostate and is undetectable in all other normal tissues tested. Novel clone 23399 showed 4.09 fold over-expression in prostate tissues as compared to other normal tissues tested. It was over-expressed in 27% of prostate tumors and was undetectable in all normal tissues tested including normal prostate tissues. Novel clone 23320 showed 3.15 fold over-expression in prostate tissues as compared to other normal tissues tested. It was detectable in all prostate tumors and 50% of normal prostate tissues. It was also expressed in normal colon and trachea. Other normal tissues do not express this gene at high level.

[1029] Subsequent full-length cloning studies on P553S, using standard techniques, revealed that this clone is an incomplete spliced form of P501S. The determined cDNA sequences for four splice variants of P553S are provided in SEQ ID NO: 702-705. An amino acid sequence encoded by SEQ ID NO: 705 is provided in SEQ ID NO: 706. The cDNA sequence of SEQ ID NO: 702 was found to contain two open reading frames (ORFs). The amino acid sequences encoded by these two ORFs are provided in SEQ ID NO: 707 and 708.

### EXAMPLE 14

### Identification of Prostate-specific Antigens by Electronic Subtraction

[1030] This Example describes the use of an electronic subtraction technique to identify prostate-specific antigens.

[1031] Potential prostate-specific genes present in the GenBank human EST database were identified by electronic subtraction (similar to that described by Vasmatizis et al., Proc. Natl. Acad. Sci. USA 95:300-304, 1998). The sequences of EST clones (43,482) derived from various prostate libraries were obtained from the GenBank public human EST database. Each prostate EST sequence was used as a query sequence in a BLASTN (National Center for Biotechnology Information) search against the human EST database. All matches considered identical (length of matching sequence >100 base pairs, density of identical matches over this region >70%) were grouped (aligned) together in a cluster. Clusters containing more than 200 ESTs were discarded since they probably represented repetitive elements or highly expressed genes such as those for ribosomal proteins. If two or more clusters shared common ESTs, those clusters were grouped together into a “supercluster,” resulting in 4,345 prostate superclusters.

[1032] Records for the 479 human cDNA libraries represented in the GenBank release were downloaded to create a database of these cDNA library records. These 479 cDNA libraries were grouped into three groups: Plus (normal prostate and prostate tumor libraries, and breast cell line libraries, in which expression was desired), Minus (libraries from other normal adult tissues, in which expression was not desirable), and Other libraries from fetal tissue, infant tissue, tissues found only in women, non-prostate tumors and cell lines other than prostate cell lines, in which expression was considered to be irrelevant). A summary of these library groups is presented in Table II.

TABLE II
Prostate cDNA Libraries and ESTs

| Library | # of Libraries | # of ESTs |
|---|---|---|
| Plus | 25 | 43,482 |
| Normal | 11 | 18,875 |
| Tumor | 11 | 21,769 |
| Cell lines | 3 | 2,838 |
| Minus | 166 | |
| Other | 287 | |

[1033] Each supercluster was analyzed in terms of the ESTs within the supercluster. The tissue source of each EST clone was noted and used to classify the superclusters into four groups: Type 1-EST clones found in the Plus group libraries only; no expression detected in Minus or Other group libraries; Type 2-EST clones derived from the Plus and Other group libraries only; no expression detected in the Minus group; Type 3-EST clones derived from the Plus, Minus and Other group libraries, but the number of ESTs derived from the Plus group is higher than in either the Minus or Other groups; and Type 4-EST clones derived from Plus, Minus and Other group libraries, but the number derived from the Plus group is higher than the number derived from the Minus group. This analysis identified 4,345 breast clusters (see Table III). From these clusters, 3,172 EST clones were ordered from Research Genetics, Inc., and were received as frozen glycerol stocks in 96-well plates.

TABLE III
Prostate Cluster Summary

| | # of | # of ESTs |
|---|---|---|
| Type | Superclusters | Ordered |
| 1 | 688 | 677 |
| 2 | 2899 | 2484 |
| 3 | 85 | 11 |
| 4 | 673 | 0 |
| Total | 4345 | 3172 |

[1034] The EST clone inserts were PCR-amplified using amino-linked PCR primers for Synteni microarray analysis. When more than one PCR product was obtained for a particular clone, that PCR product was not used for expression analysis. In total, 2,528 clones from the electronic subtraction method were analyzed by microarray analysis to identify electronic subtraction breast clones that had high levels of tumor vs. normal tissue MRNA. Such screens were performed using a Synteni (Palo Alto, Calif.) microarray, according to the manufacturer's instructions (and essentially as described by Schena et al., Proc. Natl. Acad. Sci. USA 93:10614-10619, 1996 and Heller et al., Proc. Natl. Acad. Sci. USA 94:2150-2155, 1997). Within these analyses, the clones were arrayed on the chip, which was then probed with fluorescent probes generated from normal and tumor prostate cDNA, as well as various other normal tissues. The slides were scanned and the fluorescence intensity was measured.

[1035] Clones with an expression ratio greater than 3 (i.e., the level in prostate tumor and normal prostate MRNA was at least three times the level in other normal tissue mRNA) were identified as prostate tumor-specific sequences (Table IV). The sequences of these clones are provided in SEQ ID NO: 401-453, with certain novel sequences shown in SEQ ID NO: 407, 413, 416-419, 422, 426, 427 and 450.

Table IV
Prostate-tumor Specific Clones

| | Sequence | |
|---|---|---|
| SEQ ID NO. | Designation | Comments |
| 401 | 22545 | previously identified P1000C |
| 402 | 22547 | previously identified P704P |
| 403 | 22548 | known |
| 404 | 22550 | known |
| 405 | 22551 | PSA |
| 406 | 22552 | prostate secretory protein 94 |
| 407 | 22553 | novel |
| 408 | 22558 | previously identified P509S |
| 409 | 22562 | glandular kallikrein |
| 410 | 22565 | previously identified P1000C |
| 411 | 22567 | PAP |
| 412 | 22568 | B1006C (breast tumor antigen) |
| 413 | 22570 | novel |
| 414 | 22571 | PSA |
| 415 | 22572 | previously identified P706P |
| 416 | 22573 | novel |
| 417 | 22574 | novel |
| 418 | 22575 | novel |
| 419 | 22580 | novel |
| 420 | 22581 | PAP |
| 421 | 22582 | prostatic secretory protein 94 |
| 422 | 22583 | novel |
| 423 | 22584 | prostatic secretory protein 94 |
| 424 | 22585 | prostatic secretory protein 94 |
| 425 | 22586 | known |
| 426 | 22587 | novel |
| 427 | 22588 | novel |
| 428 | 22589 | PAP |
| 429 | 22590 | known |
| 430 | 22591 | PSA |
| 431 | 22592 | known |
| 432 | 22593 | Previously identified P777P |
| 433 | 22594 | T cell receptor gamma chain |
| 434 | 22595 | Previously identified P705P |
| 435 | 22596 | Previously identified P707P |
| 436 | 22847 | PAP |
| 437 | 22848 | known |
| 438 | 22849 | prostatic secretory protein 57 |
| 439 | 22851 | PAP |
| 440 | 22852 | PAP |
| 441 | 22853 | PAP |
| 442 | 22854 | previously identified P509S |
| 443 | 22855 | previously identified P705P |
| 444 | 22856 | previously identified P774P |
| 445 | 22857 | PSA |
| 446 | 23601 | previously identified P777P |
| 447 | 23602 | PSA |
| 448 | 23605 | PSA |
| 449 | 23606 | PSA |
| 450 | 23612 | novel |
| 451 | 23614 | PSA |
| 452 | 23618 | previously identified P1000C |
| 453 | 23622 | previously identified P705P |

[1036] Further studies on the clone of SEQ ID NO: 407 (also referred to as P1020C) led to the isolation of an extended cDNA sequence provided in SEQ ID NO: 591. This extended cDNA sequence was found to contain an open reading frame that encodes the predicted amino acid sequence of SEQ ID NO: 592. The P1020C cDNA and amino acid sequences were found to show some similarity to the human endogenous retroviral HERV-K pol gene and protein. EXAMPLE 15

### Further Identification of Prostate-specific Antigens by Microarray Analysis

[1037] This Example describes the isolation of additional prostate-specific polypeptides from a prostate tumor cDNA library.

[1038] A human prostate tumor cDNA expression library as described above was screened using microarray analysis to identify clones that display at least a three fold over-expression in prostate tumor and/or normal prostate tissue, as compared to non-prostate normal tissues (not including testis). 142 clones were identified and sequenced. Certain of these clones are shown in SEQ ID NO: 454-467. Of these sequences, SEQ ID NO: 459-460 represent novel genes. The others (SEQ ID NO: 454-458 and 461-467) correspond to known sequences. Comparison of the determined cDNA sequence of SEQ ID NO: 461 with sequences in the Genbank database using the BLAST program revealed homology to the previously identified transmembrane protease serine 2 (TMPRSS2). The full-length cDNA sequence for this clone is provided in SEQ ID NO: 894, with the corresponding amino acid sequence being provided in SEQ ID NO: 895. The cDNA sequence encoding the first 209 amino acids of TMPRSS2 is provided in SEQ ID NO: 896, with the first 209 amino acids being provided in SEQ ID NO: 897.

[1039] The sequence of SEQ ID NO: 462 (referred to as P835P) was found to correspond to the previously identified clone FLJ13518 (Accession AK023643; SEQ ID NO: 917), which had no associated open reading frame (ORF). This clone was used to search the Geneseq DNA database and matched a clone previously identified as a G protein-coupled receptor protein (DNA Geneseq Accession A09351; amino acid Geneseq Accession Y92365), that is characterized by the presence of seven transmembrane domains. The sequences of fragments between these domains are provided in SEQ ID NO: 921-928, with SEQ ID NO: 921, 923, 925 and 927 representing extracellular domains and SEQ ID NO: 922, 924, 926 and 928 representing intracellular domains. SEQ ID NO: 921-928 represent amino acids 1-28, 53-61, 83-103, 124-143, 165-201, 226-238, 263-272 and 297-381, respectively, of P835P. The full-length cDNA sequence for P835P is provided in SEQ ID NO: 916. The cDNA sequence of the open reading frame for P835P, including stop codon, is provided in SEQ ID NO: 918, with the open reading frame without stop codon being provided in SEQ ID NO: 919 and the corresponding amino acid sequence being provided in SEQ ID NO: 920.

### EXAMPLE 16

### Further Characterization of Prostate-specific Antigen P710P

[1040] This Example describes the full length cloning of P710P.

[1041] The prostate cDNA library described above was screened with the P710P fragment described above. One million colonies were plated on LB/Ampicillin plates. Nylon membrane filters were used to lift these colonies, and the cDNAs picked up by these filters were then denatured and cross-linked to the filters by UV light. The P710P fragment was radiolabeled and used to hybridize with the filters. Positive cDNA clones were selected and their cDNAs recovered and sequenced by an automatic Perkin Elmer/Applied Biosystems Division Sequencer. Four sequences were obtained, and are presented in SEQ ID NO: 468-471. These sequences appear to represent different splice variants of the P710P gene. Subsequent comparison of the cDNA sequences of P710P with those in Genbank releaved homology to the DD3 gene (Genbank accession numbers AF103907 & AF103908). The cDNA sequence of DD3 is provided in SEQ ID NO: 690.

### EXAMPLE 17

### Protein Expression of Prostate-specific Antigens

[1042] This example describes the expression and purification of prostate-specific antigens in E. coli, baculovirus and mammalian cells.

[1043] a) Expression of P501S in E. coli

[1044] Expression of the full-length form of P501S was attempted by first cloning P501S without the leader sequence (amino acids 36-553 of SEQ ID NO: 113) downstream of the first 30 amino acids of the M. tuberculosis antigen Ra12 (SEQ ID NO: 484) in pET17b. Specifically, P501S DNA was used to perform PCR using the primers AW025 (SEQ ID NO: 485) and AW003 (SEQ ID NO: 486). AW025 is a sense cloning primer that contains a HindIII site. AW003 is an antisense cloning primer that contains an EcoRI site. DNA amplification was performed using 5 μl 10× Pfu buffer, 1 μl 20 mM dNTPs, 1 μl each of the PCR primers at 10 μM concentration, 40 μl water, 1 μl Pfu DNA polymerase (Stratagene, La Jolla, Calif.) and 1 μl DNA at 100 ng/μl. Denaturation at 95° C. was performed for 30 sec, followed by 10 cycles of 95° C. for 30 sec, 60° C. for 1 min and by 72° C. for 3 min. 20 cycles of 95° C. for 30 sec, 65° C. for 1 min and by 72° C. for 3 min, and lastly by 1 cycle of 72° C. for 10 min. The PCR product was cloned to Ra12m/pET17b using HindIII and EcoRi. The sequence of the resulting fusion construct (referred to as Ra12-P501S-F) was confirmed by DNA sequencing.

[1045] The fusion construct was transformed into BL21(DE3)pLysE, pLysS and CodonPlus E. coli (Stratagene) and grown overnight in LB broth with kanamycin. The resulting culture was induced with IPTG. Protein was transferred to PVDF membrane and blocked with 5% non-fat milk (in PBS-Tween buffer), washed three times and incubated with mouse anti-His tag antibody (Clontech) for 1 hour. The membrane was washed 3 times and probed with HRP-Protein A (Zymed) for 30 min. Finally, the membrane was washed 3 times and developed with ECL (Amersham). No expression was detected by Western blot. Similarly, no expression was detected by Western blot when the Ra12-P501S-F fusion was used for expression in BL21CodonPlus by CE6 phage (Invitrogen).

[1046] An N-terminal fragment of P501S (amino acids 36-325 of SEQ ID NO: 113) was cloned down-stream of the first 30 amino acids of the M. tuberculosis antigen Ra12 in pET17b as follows. P501S DNA was used to perform PCR using the primers AW025 (SEQ ID NO: 485) and AW027 (SEQ ID NO: 487). AW027 is an antisense cloning primer that contains an EcoRi site and a stop codon. DNA amplification was performed essentially as described above. The resulting PCR product was cloned to Ra12 in pET17b at the HindIII and EcoRI sites. The fusion construct (referred to as Ra12-P501S-N) was confirmed by DNA sequencing.

[1047] The Ra12-P501S-N fusion construct was used for expression in BL21(DE3)pLysE, pLysS and CodonPlus, essentially as described above. Using Western blot analysis, protein bands were observed at the expected molecular weight of 36 kDa. Some high molecular weight bands were also observed, probably due to aggregation of the recombinant protein. No expression was detected by Western blot when the Ra12-P501S-F fusion was used for expression in BL21CodonPlus by CE6 phage.

[1048] A fusion construct comprising a C-terminal portion of P501S (amino acids 257-553 of SEQ ID NO: 113) located down-stream of the first 30 amino acids of the M. tuberculosis antigen Ra12 (SEQ ID NO: 484) was prepared as follows. P501S DNA was used to perform PCR using the primers AW026 (SEQ ID NO: 488) and AW003 (SEQ ID NO: 486). AW026 is a sense cloning primer that contains a HindIII site. DNA amplification was performed essentially as described above. The resulting PCR product was cloned to Ra12 in pET17b at the HindIII and EcoRi sites. The sequence for the fusion construct (referred to as Ra12-P501S-C) was confirmed.

[1049] The Ra12-P501S-C fusion construct was used for expression in BL21(DE3)pLysE, pLysS and CodonPlus, as described above. A small amount of protein was detected by Western blot, with some molecular weight aggregates also being observed. Expression was also detected by Western blot when the Ra12-P501S-C fusion was used for expression in BL21CodonPlus induced by CE6 phage.

[1050] A fusion construct comprising a fragment of P501S (amino acids 36-298 of SEQ ID NO: 113) located down-stream of the M. tuberculosis antigen Ra12 (SEQ ID NO: 848) was prepared as follows. P501S DNA was used to perform PCR using the primers AW042 (SEQ ID NO: 849) and AW053 (SEQ ID NO: 850). AW042 is a sense cloning primer that contains a EcoRi site. AW053 is an antisense primer with stop and Xho I sites. DNA amplification was performed essentially as described above. The resulting PCR product was cloned to Ra12 in pET17b at the EcoRI and Xho I sites. The resulting fusion construct (referred to as Ra12-P501S-E2) was expressed in B834 (DE3) pLys S E. coli host cells in TB media for 2 h at room temperature. Expressed protein was purified by washing the inclusion bodies and running on a Ni-NTA column. The purified protein stayed soluble in buffer containing 20 mM Tris-HCl (pH 8), 100 mM NaCl, 10 mM β-Me and 5% glycerol. The determined cDNA and amino acid sequences for the expressed fusion protein are provided in SEQ ID NO: 851 and 852, respectfully.

[1051] b) Expression of P501S in Baculovirus

[1052] The Bac-to-Bac baculoviris expression system (BRL Life Technologies, Inc.) was used to express P501S protein in insect cells. Full-length P501S (SEQ ID NO: 113) was amplified by PCR and cloned into the XbaI site of the donor plasmid pFastBacI. The recombinant bacmid and baculovirus were prepared according to the manufacturer's instructions. The recombinant baculovirus was amplified in Sf9 cells and the high titer viral stocks were utilized to infect High Five cells (Invitrogen) to make the recombinant protein. The identity of the full-length protein was confirmed by N-terminal sequencing of the recombinant protein and by Western blot analysis (FIG. 7). Specifically, 0.6 million High Five cells in 6-well plates were infected with either the unrelated control virus BV/ECD_PD (lane 2), with recombinant baculovirus for P501S at different amounts or MOIs (lanes 4-8), or were uninfected (lane 3). Cell lysates were run on SDS-PAGE under reducing conditions and analyzed by Western blot with the anti-P501S monoclonal antibody P501S-10E3-G4D3 (prepared as described below). Lane 1 is the biotinylated protein molecular weight marker (BioLabs).

[1053] The localization of recombinant P501S in the insect cells was investigated as follows. The insect cells overexpressing P501S were fractionated into fractions of nucleus, mitochondria, membrane and cytosol. Equal amounts of protein from each fraction were analyzed by Western blot with a monoclonal antibody against P501S. Due to the scheme of fractionation, both nucleus and mitochondria fractions contain some plasma membrane components. However, the membrane fraction is basically free from mitochondria and nucleus. P501S was found to be present in all fractions that contain the membrane component, suggesting that P501S may be associated with plasma membrane of the insect cells expressing the recombinant protein.

[1054] c) Expression of P501S in Mammalian Cells

[1055] Full-length P501S (553 amino acids; SEQ ID NO: 113) was cloned into various mammalian expression vectors, including pCEP4 (Invitrogen), pVR1012 (Vical, San Diego, Calif.) and a modified form of the retroviral vector pBMN, referred to as pBIB. Transfection of P501S/pCEP4 and P501S/pVR1012 into HEK293 fibroblasts was carried out using the Fugene transfection reagent (Boehringer Mannheim). Briefly, 2 ul of Fugene reagent was diluted into 100 ul of serum-free media and incubated at room temperature for 5-10 min. This mixture was added to 1 ug of P501S plasmid DNA, mixed briefly and incubated for 30 minutes at room temperature. The Fugene/DNA mixture was added to cells and incubated for 24-48 hours. Expression of recombinant P501S in transfected HEK293 fibroblasts was detected by means of Western blot employing a monoclonal antibody to P501S.

[1056] Transfection of p501S/pCEP4 into CHO—K cells (American Type Culture Collection, Rockville, Md.) was carried out using GenePorter transfection reagent (Gene Therapy Systems, San Diego, Calif.). Briefly, 15 μl of GenePorter was diluted in 500 μl of serum-free media and incubated at room temperature for 10 min. The GenePorter/media mixture was added to 2 μg of plasmid DNA that was diluted in 500 μl of serum-free media, mixed briefly and incubated for 30 min at room temperature. CHO—K cells were rinsed in PBS to remove serum proteins, and the GenePorter/DNA mix was added and incubated for 5 hours. The transfected cells were then fed an equal volume of 2× media and incubated for 24-48 hours.

[1057] FACS analysis of P501S transiently infected CHO—K cells, demonstrated surface expression of P501S. Expression was detected using rabbit polyclonal antisera raised against a P501S peptide, as described below. Flow cytometric analysis was performed using a FaCScan (Becton Dickinson), and the data were analyzed using the Cell Quest program.

[1058] d) Expression of P703P in Baculovirus

[1059] The cDNA for full-length P703P-DE5 (SEQ ID NO: 326), together with several flanking restriction sites, was obtained by digesting the plasmid pcDNA703 with restriction endonucleases Xba I and Hind III. The resulting restriction fragment (approx. 800 base pairs) was ligated into the transfer plasmid pFastBacI which was digested with the same restriction enzymes. The sequence of the insert was confirmed by DNA sequencing. The recombinant transfer plasmid pFBP703 was used to make recombinant bacmid DNA and baculovirus using the Bac-To-Bac Baculovirus expression system (BRL Life Technologies). High Five cells were infected with the recombinant virus BVP703, as described above, to obtain recombinant P703P protein.

[1060] e) Expression of P788P in E. Coli

[1061] A truncated, N-terminal portion, of P788P (residues 1-644 of SEQ ID NO: 777; referred to as P788P-N) fused with a C-terminal 6×His Tag was expressed in E. coli as follows. P788P cDNA was amplified using the primers AW080 and AW081 (SEQ ID NO: 815 and 816). AW080 is a sense cloning primer with an NdeI site. AW081 is an antisense cloning primer with a XhoI site. The PCR-amplified P788P, as well as the vector pCRX1, were digested with NdeI and XhoI. Vector and insert were ligated and transformed into NovaBlue cells. Colonies were randomly screened for insert and then sequenced. P788P-N clone #6 was confirmed to be identical to the designed construct. The expression construct P788P-N #6/pCRX1 was transformed into E. coli BL21 CodonPlus-RIL competent cells. After induction, most of the cells grew well, achieving OD600 of greater than 2.0 after 3 hr. Coomassie stained SDS-PAGE showed an over-expressed band at about 75 kD. Western blot analysis using a 6×HisTag antibody confirmed the band was P788P-N. The determined cDNA sequence for P788P-N is provided in SEQ ID NO: 817, with the corresponding amino acid sequence being provided in SEQ ID NO: 818.

[1062] f) Expression of P510S in E. coli

[1063] The P510S protein has 9 potential transmembrane domains and is predicted to be located at the plasma membrane. The C-terminal protein of this protein, as well as the predicted third extracellular domain of P510S were expressed in E. coli as follows.

[1064] The expression construct referred to as Ra12-P501S-C was designed to have a 6 HisTag at the N-terminal enc, followed by the M. tuberculosis antigen Ra12 (SEQ ID NO: 819) and then the C-terminal portion of P510S (amino residues 1176-1261 of SEQ ID NO: 538). Full-length P510S was used to amplify the P510S-C fragment by PCR using the primers AW056 and AW057 (SEQ ID NO: 820 and 821, respectively). AW056 is a sense cloning primer with an EcoRi site. AW057 is an antisense primer with stop and XhoI sites. The amplified P501S fragment and Ra12/pCRX1 were digested with EcoRI and XhoI and then purified. The insert and vector were ligated together and transformed into NovaBlue. Colonies were randomly screened for insert and sequences. For protein expression, the expression construct was transformed into E. coli BL21 (DE3) CodonPlus-RIL competent cells. A mini-induction screen was performed to optimize the expression conditions. After induction the cells grew well, achieving OD 600 nm greater than 2.0 after 3 hours. Coomassie stain SDS-PAGE showed a highly over-expressed band at approx. 30 kD. Though this is higher than the expected molecular weight, western blot analysis was positive, showing this band to be the His tag-containing protein. The optimized culture conditions are as follows. Dilute overnight culture/daytime culture (LB+kanamycin+chloramphenicol) into 2×YT (with kanamycin and chloramphenicol) at a ratio of 25 ml culture to 1 liter 2×YT. Allow to grow at 37° C. until OD600=0.6. Take an aliquot out as T0 sample. Add 1 mM IPTG and allow to grow at 30° C. for 3 hours. Take out a T3 sample, spin down cells and store at −80° C. The determined cDNA and amino acid sequences for the Ra12-P51OS-C construct are provided in SEQ ID NO: 822 and 825, respectively.

[1065] The expression construct P510S-C was designed to have a 5′ added start codon and a glycine (GGA) codon and then the P510S C terminal fragment followed by the in frame 6× histidine tag and stop codon from the pET28b vector. The cloning strategy is similar to that used for Ra12-P510S-C, except that the PCR primers employed were those shown in SEQ ID NO: 828 and 829, respectively and the NcoI/XhoI cut in pET28b was used. The primer of SEQ ID NO: 828 created a 5′ NcoI site and added a start codon. The antisense primer of SEQ ID NO: 829 creates a XhoI site on P510S C terminal fragment. Clones were confirmed by sequencing. For protein expression, the expression construct was transformed into E. coli BL21 (DE3) CodonPlus-RIL competent cells. An OD600 of greater than 2.0 was obtained 30 hours after induction. Coomassie stained SDS-PAGE showed an over-expressed band at about 11 kD. Western blot analysis confirmed that the band was P510S-C, as did N-terminal protein sequencing. The optimized culture conditions are as follows: dilute overnight culture/daytime culture (LB+kanamycin+chloramphenicol) into 2× YT (+kanamycin and chloramphenicol) at a ratio of 25 mL culture to 1 liter 2× YT, and allow to grow at 37° C. until an OD 600 of about 0.5 is reached. Take out an aliquot as T0 sample. Add 1 mM IPTG and allow to grow at 30° C. for 3 hours. Spin down the cells and store at −80° C. until purification. The determined cDNA and amino acid sequences for the P510S-C construct are shown in SEQ ID NO: 823 and 826, respectively.

[1066] The predicted third extracellular domain of P510S (P510S-E3; residues 328-676 of SEQ ID NO: 538) was expressed in E. coli as follows. The P510S fragment was amplified by PCR using the primers shown in SEQ ID NO: 830 and 831. The primer of SEQ ID NO: 830 is a sense primer with an NdeI site for use in ligating into pPDM. The primer of SEQ ID NO: 831 is an antisense primer with an added XhoI site for use in ligating into pPDM. The resulting fragment was cloned to pPDM at the NdeI and XhoI sites. Clones were confirmed by sequencing. For protein expression, the clone ws transformed into E. coli BL21 (DE3) CodonPlus-RIL competent cells. After induction, an OD600 of greater than 2.0 was achieved after 3 hours. Coomassie stained SDS-PAGE showed an over-expressed band at about 39 kD, and N-terminal sequencing confirmed the N-terminal to be that of P510S-E3. Optimized culture conditions are as follows: dilute overnight culture/daytime culture (LB+kanamycin+chloramphenicol) into 2× YT (kanamycin and chloramphenicol) at a ratio of 25 ml culture to 1 liter 2× YT. Allow to grow at 37° C. until OD 600 equals 0.6. Take out an aliquot as T0 sample. Add 1 mM IPTG and allow to grow at 30° C. for 3 hours. Take out a T3 sample, spin down the cells and store at −80° C. until purification. The determined cDNA and amino acid sequences for the P501S-E3 construct are provided in SEQ ID NO: 824 and 827, respectively.

[1067] g) Expression of P775S in E. Coli

[1068] The antigen P775P contains multiple open reading frames (ORF). The third ORF, encoding the protein of SEQ ID NO: 483, has the best emotif score. An expression fusion construct containing the M. tuberculosis antigen Ra12 (SEQ ID NO: 819) and P775P-ORF3 with an N-terminal 6× HisTag was prepared as follows. P775P-ORF3 was amplified using the sense PCR primers of SEQ ID NO: 832 and the anti-sense PCR primer of SEQ ID NO: 833. The PCR amplified fragment of P775P and Ra12/pCRX1 were digested with the restriction enzymes EcoRI and XhoI. Vector and insert were ligated and then transformed into NovaBlue cells. Colonies were randomly screened for insert and then sequenced. A clone having the desired sequence was transformed into E. coli BL21 (DE3) CodonPlus-RIL competent cells. Two hours after induction, the cell density peaked at OD600 of approximately 1.8. Coomassie stained SDS-PAGE showed an over-expressed band at about 31 kD. Western blot using 6× HisTag antibody confirmed that the band was Ra12-P775P-ORF3. The determined cDNA and amino acid sequences for the fusion construct are provided in SEQ ID NO: 834 and 835, respectively.

[1069] H) Expression of a P703P His Tag Fusion Protein in E. coli

[1070] The cDNA for the coding region of P703P was prepared by PCR using the primers of SEQ ID NO: 836 and 837. The PCR product was digested with EcoRI restriction enzyme, gel purified and cloned into a modified pET28 vector with a His tag in frame, which had been digested with Eco72I and EcoRI restriction enzymes. The correct construct was confirmed by DNA sequence analysis and then transformed into E. coli BL21 (DE3) pLys S expression host cells. The determined amino acid and cDNA sequences for the expressed recombinant P703P are provided in SEQ ID NO: 838 and 839, respectively.

[1071] I) Expression of a P705P His Tag Fusion Protein in E. coli

[1072] The cDNA for the coding region of P705P was prepared by PCR using the primers of SEQ ID NO: 840 and 841. The PCR product was digested with EcoRI restriction enzyme, gel purified and cloned into a modified pET28 vector with a His tag in frame, which had been digested with Eco72I and EcoRI restriction enzymes. The correct construct was confirmed by DNA sequence analysis and then transformed into E. coli BL21 (DE3) pLys S and BL21 (DE3) CodonPlus expression host cells. The determined amino

[1073] A truncated coding region of P767P (referred to as B767P-B; amino acids 47-374 of SEQ ID NO: 590) was amplified by PCR using the primers PDM-573 and PDM-469 (SEQ ID NO: 937 and 936, respectively) and the PCR conditions described above for full-length P767P. The PCR product was digested with XhoI and cloned into the modified pET28 vector that was digested with Eco72I and XhoI. The construct was confirmed to be correct through sequence analysis and transformed into E. Coli BL21 pLysS and BL21 CodonPlus RP cells. The protein was found to be expressed in the inclusion body pellet. The coding region for the expressed B767P-B protein is provided in SEQ ID NO: 939, with the corresponding amino acid sequence being provided in SEQ ID NO: 940.

### EXAMPLE 18

### Preparation and Characterization of Antibodies Against Prostate-specific Polypeptides

[1074] a) Preparation and Characterization of Polyclonal Antibodies against P703P, P504S and P509S

[1075] Polyclonal antibodies against P703P, P504S and P509S were prepared as follows.

[1076] Each prostate tumor antigen expressed in an E. Coli recombinant expression system was grown overnight in LB broth with the appropriate antibiotics at 37° C. in a shaking incubator. The next morning, 10 ml of the overnight culture was added to 500 ml to 2× YT plus appropriate antibiotics in a 2L-baffled Erlenmeyer flask. When the Optical Density (at 560 nm) of the culture reached 0.4-0.6, the cells were induced with IPTG (1 mM). Four hours after induction with IPTG, the cells were harvested by centrifugation. The cells were then washed with phosphate buffered saline and centrifuged again. The supernatant was discarded and the cells were either frozen for future use or immediately processed. Twenty ml of lysis buffer was added to the cell pellets and vortexed. To break open the E. coli cells, this mixture was then run through the French Press at a pressure of 16,000 psi. The cells were then centrifuged again and the supernatant and pellet were checked by SDS-PAGE for the partitioning of the recombinant protein. For proteins that localized to the cell pellet, the pellet was resuspended in 10 mM Tris pH 8.0, 1% CHAPS and the inclusion body pellet was washed and centrifuged again. This procedure was repeated twice more. The washed inclusion body pellet was solubilized with either 8 M urea or 6 M guanidine HCl containing 10 mM Tris pH 8.0 plus 10 mM imidazole. The solubilized protein was added to 5 ml of nickel-chelate resin (Qiagen) and incubated for 45 min to 1 hour at room temperature with continuous agitation. After incubation, the resin and protein mixture were poured through a disposable column and the flow through was collected. The column was then washed with 10-20 column volumes of the solubilization buffer. The antigen was then eluted from the column using 8M urea, 10 mM Tris pH 8.0 and 300 mM imidazole and collected in 3 ml fractions. A SDS-PAGE gel was run to determine which fractions to pool for further purification.

[1077] As a final purification step, a strong anion exchange resin such as HiPrepQ (Biorad) was equilibrated with the appropriate buffer and the pooled fractions from above were loaded onto the column. Each antigen was eluted off the column with a increasing salt gradient. Fractions were collected as the column was run and another SDS-PAGE gel was run to determine which fractions from the column to pool. The pooled fractions were dialyzed against 10 mM Tris pH 8.0. The proteins were then vialed after filtration through a 0.22 micron filter and the antigens were frozen until needed for immunization.

[1078] Four hundred micrograms of each prostate antigen was combined with 100 micrograms of muramyldipeptide (MDP). Every four weeks rabbits were boosted with 100 micrograms mixed with an equal volume of Incomplete Freund's Adjuvant (IFA). Seven days following each boost, the animal was bled. Sera was generated by incubating the blood at 4° C. for 12-4 hours followed by centrifugation.

[1079] Ninety-six well plates were coated with antigen by incubating with 50 microliters (typically 1 microgram) of recombinant protein at 4° C. for 20 hours. 250 microliters of BSA blocking buffer was added to the wells and incubated at room temperature for 2 hours. Plates were washed 6 times with PBS/0.01% Tween. Rabbit sera was diluted in PBS. Fifty microliters of diluted sera was added to each well and incubated at room temperature for 30 min. Plates were washed as described above before 50 microliters of goat anti-rabbit horse radish peroxidase (HRP) at a 1:10000 dilution was added and incubated at room temperature for 30 min. Plates were again washed as described above and 100 microliters of TMB microwell peroxidase substrate was added to each well. Following a 15 min incubation in the dark at room temperature, the colorimetric reaction was stopped with 100 microliters of 1N H₂SO₄ and read immediately at 450 mn. All polyclonal antibodies showed immunoreactivity to the appropriate antigen.

[1080] b) Preparation and Characterization of Antibodies against P501S

[1081] A murine monoclonal, antibody directed against the carboxy-terminus of the prostate-specific antigen P501S was prepared as follows.

[1082] A truncated fragment of P501S (amino acids 355-526 of SEQ ID NO: 113) was generated and cloned into the pET28b vector (Novagen) and expressed in E. coli as a thioredoxin fusion protein with a histidine tag. The trx-P501S fusion protein was purified by nickel chromatography, digested with thrombin to remove the trx fragment and further purified by an acid precipitation procedure followed by reverse phase HPLC.

[1083] Mice were immunized with truncated P501S protein. Serum bleeds from mice that potentially contained anti-P501S polyclonal sera were tested for P501S-specific reactivity using ELISA assays with purified P501S and trx-P501S proteins. Serum bleeds that appeared to react specifically with P501S were then screened for P501S reactivity by Western analysis. Mice that contained a P501S-specific antibody component were sacrificed and spleen cells were used to generate anti-P501S antibody producing hybridomas using standard techniques. Hybridoma supernatants were tested for P501S-specific reactivity initially by ELISA, and subsequently by FACS analysis of reactivity with P501S transduced cells. Based on these results, a monoclonal hybridoma referred to as 10E3 was chosen for further subcloning. A number of subclones were generated, tested for specific reactivity to P501S using ELISA and typed for IgG isotype. The results of this analysis are shown below in Table V. Of the 16 subclones tested, the monoclonal antibody 10E3-G4-D3 was selected for further study.

TABLE V
Isotype analysis of murine anti-P501S monoclonal antibodies

| Hybridoma clone | Isotype | Estimated [Ig] in supernatant (μg/ml) |
|---|---|---|
| 4D11 | IgG1 | 14.6 |
| 1G1 | IgG1 | 0.6 |
| 4F6 | IgG1 | 72 |
| 4H5 | IgG1 | 13.8 |
| 4H5-E12 | IgG1 | 10.7 |
| 4H5-EH2 | IgG1 | 9.2 |
| 4H5-H2-A10 | IgG1 | 10 |
| 4H5-H2-A3 | IgG1 | 12.8 |
| 4H5-H2-A10-G6 | IgG1 | 13.6 |
| 4H5-H2-B11 | IgG1 | 12.3 |
| 10E3 | IgG2a | 3.4 |
| 10E3-D4 | IgG2a | 3.8 |
| 10E3-D4-G3 | IgG2a | 9.5 |
| 10E3-D4-G6 | IgG2a | 10.4 |
| 10E3-E7 | IgG2a | 6.5 |
| 8H12 | IgG2a | 0.6 |

[1084] The specificity of 10E3-G4-D3 for P501S was examined by FACS analysis. Specifically, cells were fixed (2% formaldehyde, 10 minutes), permeabilized (0.1% saponin, 10 minutes) and stained with 10E3-G4-D3 at 0.5-1 μg/ml, followed by incubation with a secondary, FITC-conjugated goat anti-mouse Ig antibody (Pharmingen, San Diego, Calif.). Cells were then analyzed for FITC fluorescence using an Excalibur fluorescence activated cell sorter. For FACS analysis of transduced cells, B-LCL were retrovirally transduced with P501S. For analysis of infected cells, B-LCL were infected with a vaccinia vector that expresses P501S. To demonstrate specificity in these assays, B-LCL transduced with a different antigen (P703P) and uninfected B-LCL vectors were utilized. 10E3-G4-D3 was shown to bind with P501S-transduced B-LCL and also with P501S-infected B-LCL, but not with either uninfected cells or P703P-transduced cells.

[1085] To determine whether the epitope recognized by 10E3-G4-D3 was found on the surface or in an intracellular compartment of cells, B-LCL were transduced with P501S or HLA-B8 as a control antigen and either fixed and permeabilized as described above or directly stained with 10E3-G4-D3 and analyzed as above. Specific recognition of P501S by 10E3-G4-D3 was found to require permeabilization, suggesting that the epitope recognized by this antibody is intracellular.

[1086] The reactivity of 10E3-G4-D3 with the three prostate tumor cell lines Lncap, PC-3 and DU-145, which are known to express high, medium and very low levels of P501S, respectively, was examined by permeabilizing the cells and treating them as described above. Higher reactivity of 10E3-G4-D3 was seen with Lncap than with PC-3, which in turn showed higher reactivity that DU-145. These results are in agreement with the real time PCR and demonstrate that the antibody specifically recognizes P501S in these tumor cell lines and that the epitope recognized in prostate tumor cell lines is also intracellular.

[1087] Specificity of 10E3-G4-D3 for P501S was also demonstrated by Western blot analysis. Lysates from the prostate tumor cell lines Lncap, DU-145 and PC-3, from P501S-transiently transfected HEK293 cells, and from non-transfected HEK293 cells were generated. Western blot analysis of these lysates with 10E3-G4-D3 revealed a 46 kDa immunoreactive band in Lncap, PC-3 and P501S-transfected HEK cells, but not in DU-145 cells or non-transfected HEK293 cells. P501S mRNA expression is consistent with these results since semi-quantitative PCR analysis revealed that P501S mRNA is expressed in Lncap, to a lesser but detectable level in PC-3 and not at all in DU-145 cells. Bacterially expressed and purified recombinant P501S (referred to as P501SStr2) was recognized by 10E3-G4-D3 (24 kDa), as was full-length P501S that was transiently expressed in HEK293 cells using either the expression vector VR1012 or pCEP4. Although the predicted molecular weight of P501S is 60.5 kDa, both transfected and “native” P501S run at a slightly lower mobility due to its hydrophobic nature.

[1088] Immunohistochemical analysis was performed on prostate tumor and a panel of normal tissue sections (prostate, adrenal, breast, cervix, colon, duodenum, gall bladder, ileum, kidney, ovary, pancreas, parotid gland, skeletal muscle, spleen and testis). Tissue samples were fixed in formalin solution for 24 hours and embedded in paraffin before being sliced into 10 micron sections. Tissue sections were permeabilized and incubated with 10E3-G4-D3 antibody for 1 hr. HRP-labeled anti-mouse followed by incubation with DAB chromogen was used to visualize P501S immunoreactivity. P501S was found to be highly expressed in both normal prostate and prostate tumor tissue but was not detected in any of the other tissues tested.

[1089] To identify the epitope recognized by 10E3-G4-D3, an epitope mapping approach was pursued. A series of 13 overlapping 20-21 mers (5 amino acid overlap; SEQ ID NO: 489-501) was synthesized that spanned the fragment of P501S used to generate 10E3-G4-D3. Flat bottom 96 well microtiter plates were coated with either the peptides or the P501S fragment used to immunize mice, at 1 microgram/ml for 2 hours at 37° C. Wells were then aspirated and blocked with phosphate buffered saline containing 1% (w/v) BSA for 2 hours at room temperature, and subsequently washed in PBS containing 0.1% Tween 20 (PBST). Purified antibody 10E3-G4-D3 was added at 2 fold dilutions (1000 ng-16 ng) in PBST and incubated for 30 minutes at room temperature. This was followed by washing 6 times with PBST and subsequently incubating with HRP-conjugated donkey anti-mouse IgG (H+L)Affinipure F(ab′) fragment (Jackson Immunoresearch, West Grove, Pa.) at 1:20000 for 30 minutes. Plates were then washed and incubated for 15 minutes in tetramethyl benzidine. Reactions were stopped by the addition of 1N sulfuric acid and plates were read at 450 nm using an ELISA plate reader. As shown in FIG. 8, reactivity was seen with the peptide of SEQ ID NO: 496 (corresponding to amino acids 439-459 of P501S) and with the P501S fragment but not with the remaining peptides, demonstrating that the epitope recognized by 10E3-G4-D3 is localized to amino acids 439-459 of SEQ ID NO: 113.

[1090] In order to further evaluate the tissue specificity of P501S, multi-array immunohistochemical analysis was performed on approximately 4700 different human tissues encompassing all the major normal organs as well as neoplasias derived from these tissues. Sixty-five of these human tissue samples were of prostate origin. Tissue sections 0.6 mm in diameter were formalin-fixed and paraffin embedded. Samples were pretreated with HIER using 10 mM citrate buffer pH 6.0 and boiling for 10 min. Sections were stained with 10E3-G4-D3 and P501S immunoreactivity was visualized with HRP. All the 65 prostate tissues samples (5 normal, 55 untreated prostate tumors, 5 hormone refractory prostate tumors) were positive, showing distinct perinuclear staining. All other tissues examined were negative for P501S expression.

[1091] c) Preparation and Characterization of Antibodies against P503S

[1092] A fragment of P503S (amino acids 113-241 of SEQ ID NO: 114) was expressed and purified from bacteria essentially as described above for P501S and used to immunize both rabbits and mice. Mouse monoclonal antibodies were isolated using standard hybridoma technology as described above. Rabbit monoclonal antibodies were isolated using Selected Lymphocyte Antibody Method (SLAM) technology at Immgenics Pharmaceuticals (Vancouver, BC, Canada). Table VI, below, lists the monoclonal antibodies that were developed against P503 S.

TABLE VI

| | |
|---|---|
| Antibody | Species |
| 20D4 | Rabbit |
| JA1 | Rabbit |
| 1A4 | Mouse |
| 1C3 | Mouse |
| 1C9 | Mouse |
| 1D12 | Mouse |
| 2A11 | Mouse |
| 2H9 | Mouse |
| 4H7 | Mouse |
| 8A8 | Mouse |
| Antibody | Species |
| 8D10 | Mouse |
| 9C12 | Mouse |
| 6D12 | Mouse |

[1093] The DNA sequences encoding the complementarity determining regions (CDRs) for the rabbit monoclonal antibodies 20D4 and JA1 were determined and are provided in SEQ ID NO: 502 and 503, respectively.

[1094] In order to better define the epitope binding region of each of the antibodies, a series of overlapping peptides were generated that span amino acids 109-213 of SEQ ID NO: 114. These peptides were used to epitope map the anti-P503S monoclonal antibodies by ELISA as follows. The recombinant fragment of P503S that was employed as the immunogen was used as a positive control. Ninety-six well microtiter plates were coated with either peptide or recombinant antigen at 20 ng/well overnight at 4° C. Plates were aspirated and blocked with phosphate buffered saline containing 1% (w/v) BSA for 2 hours at room temperature then washed in PBS containing 0.1% Tween 20 (PBST). Purified rabbit monoclonal antibodies diluted in PBST were added to the wells and incubated for 30 min at room temperature. This was followed by washing 6 times with PBST and incubation with Protein-A HRP conjugate at a 1:2000 dilution for a further 30 min. Plates were washed six times in PBST and incubated with tetramethylbenzidine (TMB) substrate for a further 15 min. The reaction was stopped by the addition of 1N sulfuric acid and plates were read at 450 nm using at ELISA plate reader. ELISA with the mouse monoclonal antibodies was performed with supernatants from tissue culture run neat in the assay.

[1095] All of the antibodies bound to the recombinant P503S fragment, with the exception of the negative control SP2 supernatant. 20D4, JA1 and 1D12 bound strictly to peptide #2101 (SEQ ID NO: 504), which corresponds to amino acids 151-169 of SEQ ID NO: 114. 1C3 bound to peptide #2102 (SEQ ID NO: 505), which corresponds to amino acids 165-184 of SEQ ID NO: 114. 9C12 bound to peptide #2099 (SEQ ID NO: 522), which corresponds to amino acids 120-139 of SEQ ID NO: 114. The other antibodies bind to regions that were not examined in these studies.

[1096] Subsequent to epitope mapping, the antibodies were tested by FACS analysis on a cell line that stably expressed P503S to confirm that the antibodies bind to cell surface epitopes. Cells stably transfected with a control plasmid were employed as a negative control. Cells were stained live with no fixative. 0.5 ug of anti-P503S monoclonal antibody was added and cells were incubated on ice for 30 min before being washed twice and incubated with a FITC-labelled goat anti-rabbit or mouse secondary antibody for 20 min. After being washed twice, cells were analyzed with an Excalibur fluorescent activated cell sorter. The monoclonal antibodies 1C3, 1D12, 9C12, 20D4 and JA1, but not 8D3, were found to bind to a cell surface epitope of P503S.

[1097] In order to determine which tissues express P503S, inununohistochemical analysis was performed, essentially as described above, on a panel of normal tissues (prostate, adrenal, breast, cervix, colon, duodenum, gall bladder, ileum, kidney, ovary, pancreas, parotid gland, skeletal muscle, spleen and testis). HRP-labeled anti-mouse or anti-rabbit antibody followed by incubation with TMB was used to visualize P503S immunoreactivity. P503S was found to be highly expressed in prostate tissue, with lower levels of expression being observed in cervix, colon, ileum and kidney, and no expression being observed in adrenal, breast, duodenum, gall bladder, ovary, pancreas, parotid gland, skeletal muscle, spleen and testis.

[1098] Western blot analysis was used to characterize anti-P503S monoclonal antibody specificity. SDS-PAGE was performed on recombinant (rec) P503S expressed in and purified from bacteria and on lysates from HEK293 cells transfected with full length P503S. Protein was transferred to nitrocellulose and then Western blotted with each of the anti-P503S monoclonal antibodies (20D4, JA1, 1D12, 6D12 and 9C12) at an antibody concentration of 1 ug/ml. Protein was detected using horse radish peroxidase (HRP) conjugated to either a goat anti-mouse monoclonal antibody or to protein A-sepharose. The monoclonal antibody 20D4 detected the appropriate molecular weight 14 kDa recombinant P503S (amino acids 113-241) and the 23.5 kDa species in the HEK293 cell lysates transfected with full length P503S. Other anti-P503S monoclonal antibodies displayed similar specificity by Western blot.

[1099] d) Preparation and Characterization of Antibodies against P703P

[1100] Rabbits were immunized with either a truncated (P703Ptr1; SEQ ID NO: 172) or full-length mature form (P703Pf1; SEQ ID NO: 523) of recombinant P703P protein was expressed in and purified from bacteria as described above. Affinity purified polyclonal antibody was generated using immunogen P703Pf1 or P703Ptr1 attached to a solid support. Rabbit monoclonal antibodies were isolated using SLAM technology at lmmgenics Pharmaceuticals. Table VII below lists both the polyclonal and monoclonal antibodies that were generated against P703P.

TABLE VII

| Antibody | Immunogen | Species/type |
|---|---|---|
| Aff. Purif. P703P (truncated); #2594 | P703Ptrl | Rabbit polyclonal |
| Aff. Purif. P703P (full length); #9245 | P703Pfl | Rabbit polyclonal |
| 2D4 | P703Ptrl | Rabbit monoclonal |
| 8H2 | P703Ptrl | Rabbit monoclonal |
| 7H8 | P703Ptrl | Rabbit monoclonal |

[1101] The DNA sequences encoding the complementarity determining regions (CDRs) for the rabbit monoclonal antibodies 8H2, 7H8 and 2D4 were determined and are provided in SEQ ID NO: 506-508, respectively.

[1102] Epitope mapping studies were performed as described above. Monoclonal antibodies 2D4 and 7H8 were found to specifically bind to the peptides of SEQ ID NO: 509 (corresponding to amino acids 145-159 of SEQ ID NO: 172) and SEQ ID NO: 510 (corresponding to amino acids 11-25 of SEQ ID NO: 172), respectively. The polyclonal antibody 2594 was found to bind to the peptides of SEQ ID NO: 511-514, with the polyclonal antibody 9427 binding to the peptides of SEQ ID NO: 515-517.

[1103] The specificity of the anti-P703P antibodies was determined by Western blot analysis as follows. SDS-PAGE was performed on (1) bacterially expressed recombinant antigen; (2) lysates of HEK293 cells and Ltk-/- cells either untransfected or transfected with a plasmid expressing full length P703P; and (3) supernatant isolated from these cell cultures. Protein was transferred to nitrocellulose and then Western blofted using the anti-P703P polyclonal antibody #2594 at an antibody concentration of 1 ug/ml. Protein was detected using horse radish peroxidase (HRP) conjugated to an anti-rabbit antibody. A 35 kDa immunoreactive band could be observed with recombinant P703P. Recombinant P703P runs at a slightly higher molecular weight since it is epitope tagged. In lysates and supernatants from cells transfected with full length P703P, a 30 kDa band corresponding to P703P was observed. To assure specificity, lysates from HEK293 cells stably transfected with a control plasmid were also tested and were negative for P703P expression. Other anti-P703P antibodies showed similar results.

[1104] Immunohistochemical studies were performed as described above, using anti-P703P monoclonal antibody. P703P was found to be expressed at high levels in normal prostate and prostate tumor tissue but was not detectable in all other tissues tested (breast tumor, lung tumor and normal kidney).

[1105] e) Preparation and Characterization of Antibodies against P504S

[1106] Full-length P504S (SEQ ID NO: 108) was expressed and purified from bacteria essentially as described above for P501S and employed to raise rabbit monoclonal antibodies using Selected Lymphocyte Antibody Method (SLAM) technology at Immgenics Pharmaceuticals (Vancouver, BC, Canada). The anti-P504S monoclonal antibody 13H4 was shown by Western blot to bind to both expressed recombinant P504S and to native P504S in tumor cells.

[1107] Immunohistochemical studies using 13H4 to assess P504S expression in various prostate tissues were performed as described above. A total of 104 cases, including 65 cases of radical prostatectomies with prostate cancer (PC), 26 cases of prostate biopsies and 13 cases of benign prostate hyperplasia (BPH), were stained with the anti-P504S monoclonal antibody 13H4. P504S showed strongly cytoplasmic granular staining in 64/65 (98.5%) of PCs in prostatectomies and 26/26 (100% ) of PCs in prostatic biopsies. P504S was stained strongly and diffusely in carcinomas (4+ in 91.2% of cases of PC; 3+ in 5.5%; 2+ in 2.2% and 1+ in 1.1%) and high grade prostatic intraepithelial neoplasia (4+ in all cases). The expression of P504S did not vary with Gleason score. Only 17/91 (18.7%) of cases of NP/BPH around PC and 2/13 (15.4%) of BPH cases were focally (1+, no 2+ to 4+ in all cases) and weakly positive for P504S in large glands. Expression of P504S was not found in small atrophic glands, postatrophic hyperplasia, basal cell hyperplasia and transitional cell metaplasia in either biopsies or prostatectomies. P504S was thus found to be over-expressed in all Gleason scores of prostate cancer (98.5 to 100% of sensitivity) and exhibited only focal positivities in large normal glands in 19/104 of cases (82.3% of specificity). These findings indicate that P504S may be usefully employed for the diagnosis of prostate cancer.

### EXAMPLE 19

### Characterization of Cell Surface Expression and Chromosome Localization of the Prostate-specific Antigen P501S

[1108] This example describes studies demonstrating that the prostate-specific antigen P501S is expressed on the surface of cells, together with studies to determine the probable chromosomal location of P501S.

[1109] The protein P501S (SEQ ID NO: 113) is predicted to have 11 transmembrane domains. Based on the discovery that the epitope recognized by the anti-P501S monoclonal antibody 10E3-G4-D3 (described above in Example 17) is intracellular, it was predicted that following transmembrane determinants would allow the prediction of extracellular domains of P501S. FIG. 9 is a schematic representation of the P501S protein showing the predicted location of the transmembrane domains and the intracellular epitope described in Example 17. Underlined sequence represents the predicted transmembrane domains, bold sequence represents the predicted extracellular domains, and italicized sequence represents the predicted intracellular domains. Sequence that is both bold and underlined represents sequence employed to generate polyclonal rabbit serum. The location of the transmembrane domains was predicted using HHMTOP as described by Tusnady and Simon (Principles Governing Amino Acid Composition of Integral Membrane Proteins: Applications to Topology Prediction, J. Mol. Biol. 283:489-506, 1998).

[1110] Based on FIG. 9, the P501S domain flanked by the transmembrane domains corresponding to amino acids 274-295 and 323-342 is predicted to be extracellular. The peptide of SEQ ID NO: 518 corresponds to amino acids 306-320 of P501S and lies in the predicted extracellular domain. The peptide of SEQ ID NO: 519, which is identical to the peptide of SEQ ID NO: 518 with the exception of the substitution of the histidine with an asparginine, was synthesized as described above. A Cys-Gly was added to the C-terminus of the peptide to facilitate conjugation to the carrier protein. Cleavage of the peptide from the solid support was carried out using the following cleavage mixture: trifluoroacetic acid:ethanediol:thioanisol:water:phenol (40:1:2:2:3). After cleaving for two hours, the peptide was precipitated in cold ether. The peptide pellet was then dissolved in 10% v/v acetic acid and lyophilized prior to purification by C18 reverse phase hplc. A gradient of 5-60% acetonitrile (containing 0.05% TFA) in water (containing 0.05% TFA) was used to elute the peptide. The purity of the peptide was verified by hplc and mass spectrometry, and was determined to be >95%. The purified peptide was used to generate rabbit polyclonal antisera as described above.

[1111] Surface expression of P501S was examined by FACS analysis. Cells were stained with the polyclonal anti-P501S peptide serum at 10 μg/ml, washed, incubated with a secondary FITC-conjugated goat anti-rabbit Ig antibody (ICN), washed and analyzed for FITC fluorescence using an Excalibur fluorescence activated cell sorter. For FACS analysis of transduced cells, B-LCL were retrovirally transduced with P501S. To demonstrate specificity in these assays, B-LCL transduced with an irrelevant antigen (P703P) or nontransduced were stained in parallel. For FACS analysis of prostate tumor cell lines, Lncap, PC-3 and DU-145 were utilized. Prostate tumor cell lines were dissociated from tissue culture plates using cell dissociation medium and stained as above. All samples were treated with propidium iodide (PI) prior to FACS analysis, and data was obtained from PI-excluding (i.e., intact and non-permeabilized) cells. The rabbit polyclonal serum generated against the peptide of SEQ ID NO: 519 was shown to specifically recognize the surface of cells transduced to express P501S, demonstrating that the epitope recognized by the polyclonal serum is extracellular.

[1112] To determine biochemically if P501S is expressed on the cell surface, peripheral membranes from Lncap cells were isolated and subjected to Western blot analysis. Specifically, Lncap cells were lysed using a dounce homogenizer in 5 ml of homogenization buffer (250 mM sucrose, 10 mM HEPES, 1 mM EDTA, pH 8.0, 1 complete protease inhibitor tablet (Boehringer Mannheim)). Lysate samples were spun at 1000 g for 5 min at 4° C. The supernatant was then spun at 8000g for 10 min at 4° C. Supernatant from the 8000g spin was recovered and subjected to a 100,000 g spin for 30 min at 4° C. to recover peripheral membrane. Samples were then separated by SDS-PAGE and Western blotted with the mouse monoclonal antibody 10E3-G4-D3 (described above in Example 17) using conditions described above. Recombinant purified P501S, as well as HEK293 cells transfected with and over-expressing P501S were included as positive controls for P501S detection. LCL cell lysate was included as a negative control. P501S could be detected in Lncap total cell lysate, the 8000g (internal membrane) fraction and also in the 100,000 g (plasma membrane) fraction. These results indicate that P501S is expressed at, and localizes to, the peripheral membrane.

[1113] To demonstrate that the rabbit polyclonal antiserum generated to the peptide of SEQ ID NO: 519 specifically recognizes this peptide as well as the corresponding native peptide of SEQ ID NO: 518, ELISA analyses were performed. For these analyses, flat-bottomed 96 well microtiter plates were coated with either the peptide of SEQ ID NO: 519, the longer peptide of SEQ ID NO: 520 that spans the entire predicted extracellular domain, the peptide of SEQ ID NO: 521 which represents the epitope recognized by the P501S-specific antibody 10E3-G4-D3, or a P501S fragment (corresponding to amino acids 355-526 of SEQ ID NO: 113) that does not include the immunizing peptide sequence, at 1 μg/ml for 2 hours at 37° C. Wells were aspirated, blocked with phosphate buffered saline containing 1% (w/v) BSA for 2 hours at room temperature and subsequently washed in PBS containing 0.1% Tween 20 (PBST). Purified anti-P501S polyclonal rabbit serum was added at 2 fold dilutions (1000 ng -125 ng) in PBST and incubated for 30 min at room temperature. This was followed by washing 6 times with PBST and incubating with HRP-conjugated goat anti-rabbit IgG (H+L) Affinipure F(ab′) fragment at 1:20000 for 30 min. Plates were then washed and incubated for 15 min in tetramethyl benzidine. Reactions were stopped by the addition of IN sulfuric acid and plates were read at 450 nm using an ELISA plate reader. As shown in FIG. 11, the anti-P501S polyclonal rabbit serum specifically recognized the peptide of SEQ ID NO: 519 used in the immunization as well as the longer peptide of SEQ ID NO: 520, but did not recognize the irrelevant P501S-derived peptides and fragments.

[1114] In further studies, rabbits were immunized with peptides derived from the P501S sequence and predicted to be either extracellular or intracellular, as shown in FIG. 9. Polyclonal rabbit sera were isolated and polyclonal antibodies in the serum were purified, as described above. To determine specific reactivity with P501S, FACS analysis was employed, utilizing either B-LCL transduced with P501S or the irrelevant antigen P703P, of B-LCL infected with vaccinia virus-expressing P501S. For surface expression, dead and non-intact cells were excluded from the analysis as described above. For intracellular staining, cells were fixed and permeabilized as described above. Rabbit polyclonal serum generated against the peptide of SEQ ID NO: 548, which corresponds to amino acids 181-198 of P501S, was found to recognize a surface epitope of P501S. Rabbit polyclonal serum generated against the peptide SEQ ID NO: 551, which corresponds to amino acids 543-553 of P501S, was found to recognize an epitope that was either potentially extracellular or intracellular since in different experiments intact or perneabilized cells were recognized by the polyclonal sera. Based on similar deductive reasoning, the sequences of SEQ ID NO: 541-547, 549 and 550, which correspond to amino acids 109-122, 539-553, 509-520, 37-54, 342-359, 295-323, 217-274, 143-160 and 75-88, respectively, of P501S, can be considered to be potential surface epitopes of P501S recognized by antibodies.

[1115] In further studies, mouse monoclonal antibodies were raised against amino acids 296 to 322 to P501S, which are predicted to be in an extracellular domain. A/J mice were immunized with P501S/adenovirus, followed by subsequent boosts with an E. coli recombinant protein, referred to as P501N, that contains amino acids 296 to 322 of P501S, and with peptide 296-322 (SEQ ID NO: 898) coupled with KLH. The mice were subsequently used for splenic B cell fusions to generate anti-peptide hybridomas. The resulting 3 clones, referred to as 4F4 (IgG1,kappa), 4G5 (IgG2a,kappa) and 9B9 (IgG1,kappa), were grown for antibody production. The 4G5 mAb was purified by passing the supernatant over a Protein A-sepharose column, followed by antibody elution using 0.2M glycine, pH 2.3. Purified antibody was neutralized by the addition of 1M Tris, pH 8, and buffer exchanged into PBS.

[1116] For ELISA analysis, 96 well plates were coated with P501S peptide 296-322 (referred to as P501-long), an irrelevant P775 peptide, P501S-N, P501TR2, P501S-long-KLH, P501S peptide 306-319 (referred to as P501-short)-KLH, or the irrelevant peptide 2073-KLH, all at a concentration of 2 ug/ml and allowed to incubate for 60 minutes at 37 ° C. After coating, plates were washed 5× with PBS +0.1% Tween and then blocked with PBS, 0.5% BSA, 0.4% Tween20 for 2 hours at room temperature. Following the addition of supernatants or purified mAb, the plates were incubated for 60 minutes at room temperature. Plates were washed as above and donkey anti-mouse IgHRP-linked secondary antibody was added and incubated for 30 minutes at room temperature, followed by a final washing as above. TMB peroxidase substrate was added and incubated 15 minutes at room temperature in the dark. The reaction was stopped by the addition of 1N H₂SO₄ and the OD was read at 450 nM. All three hybrid clones secreted mAb that recognized peptide 296-322 and the recombinant protein P501N.

[1117] For FACS analysis, HEK293 cells were transiently transfected with a P501S/VR1012 expression constructs using Fugene 6 reagent. After 2 days of culture, cells were harvested and washed, then incubated with purified 4G5 mAb for 30 minutes on ice. After several washes in PBS, 0.5% BSA, 0.01% azide, goat anti-mouse Ig-FITC was added to the cells and incubated for 30 minutes on ice. Cells were washed and resuspended in wash buffer including 1% propidium iodide and subjected to FACS analysis. The FACS analysis confirmed that amino acids 296-322 of P501S are in an extracellular domain and are cell surface expressed.

[1118] The chromosomal location of P501S was determined using the GeneBridge 4 Radiation Hybrid panel (Research Genetics). The PCR primers of SEQ ID NO: 528 and 529 were employed in PCR with DNA pools from the hybrid panel according to the manufacturer's directions. After 38 cycles of amplification, the reaction products were separated on a 1.2% agarose gel, and the results were analyzed through the Whitehead Institute/MIT Center for Genome Research web server (http://www-genome.wi.mit.edu/cgi-bin/contig/rhmapper.pl) to determine the probable chromosomal location. Using this approach, P501S was mapped to the long arm of chromosome 1 at WI-9641 between q32 and q42. This region of chromosome 1 has been linked to prostate cancer susceptibility in hereditary prostate cancer (Smith et al. Science 274:1371-1374, 1996 and Berthon et al. Am. J. Hum. Genet. 62:1416-1424, 1998). These results suggest that P501S may play a role in prostate cancer malignancy.

### EXAMPLE 20

### Regulation of Expression of the Prostate-specific Antigen P501S

[1119] Steroid (androgen) hormone modulation is a common treatment modality in prostate cancer. The expression of a number of prostate tissue-specific antigens have previously been demonstrated to respond to androgen. The responsiveness of the prostate-specific antigen P501S to androgen treatment was examined in a tissue culture system as follows.

[1120] Cells from the prostate tumor cell line LNCaP were plated at 1.5×10⁶ cells/T75 flask (for RNA isolation) or 3×10⁵ cells/well of a 6-well plate (for FACS analysis) and grown overnight in RPMI 1640 media containing 10% charcoal-stripped fetal calf serum (BRL Life Technologies, Gaithersburg, Md.). Cell culture was continued for an additional 72 hours in RPMI 1640 media containing 10% charcoal-stripped fetal calf serum, with 1 nM of the synthetic androgen Methyltrienolone (R1881; New England Nuclear) added at various time points. Cells were then harvested for RNA isolation and FACS analysis at 0, 1, 2, 4, 8, 16, 24, 28 and 72-hours post androgen addition. FACS analysis was performed using the anti-P501S antibody 10E3-G4-D3 and permeabilized 5 cells.

[1121] For Northern analysis, 5-10 micrograms of total RNA was run on a formaldehyde denaturing gel, transferred to Hybond-N nylon membrane (Amersham Pharmacia Biotech, Piscataway, N.J.), cross-linked and stained with methylene blue. The filter was then prehybridized with Church's Buffer (250 mM Na₂HPO₄, 70 mM H₃PO₄, 1 mM EDTA, 1% SDS, 1% BSA in pH 7.2) at 65° C. for 1 hour. P501S DNA was labeled with 32P using High Prime random-primed DNA labeling kit (Boehringer Mannheim). Unincorporated label was removed using MicroSpin S300-HR columns (Amersham Pharmacia Biotech). The RNA filter was then hybridized with fresh Church's Buffer containing labeled cDNA overnight, washed with 1× SCP (0.1 M NaCl, 0.03 M Na₂HPO₄.7H₂O, 0.001 M Na₂EDTA), 1% sarkosyl (n-lauroylsarcosine) and exposed to X-ray film.

[1122] Using both FACS and Northern analysis, P501S message and protein levels were found in increase in response to androgen treatment.

### EXAMPLE 21

### Preparation of Fusion Proteins of Prostate-specific Antigens

[1123] The example describes the preparation of a fusion protein of the prostate-specific antigen P703P and a truncated form of the known prostate antigen PSA. The truncated form of PSA has a 21 amino acid deletion around the active serine site. The expression construct for the fusion protein also has a restriction site at 3′ end, immediately prior to the termination codon, to aid in adding cDNA for additional antigens.

[1124] The full-length cDNA for PSA was obtained by RT-PCR from a pool of RNA from human prostate tumor tissues using the primers of SEQ ID NO: 607 and 608, and cloned in the vector pCR-Blunt II-TOPO. The resulting cDNA was employed as a template to make two different fragments of PSA by PCR with two sets of primers (SEQ ID NO: 609 and 610; and SEQ ID NO: 611 and 612). The PCR products having the expected size were used as templates to make truncated forms of PSA by PCR with the primers of SEQ ID NO: 611 and 613, which generated PSA (delta 208-218 in amino acids). The cDNA for the mature form of P703P with a 6× histidine tag at the 5′ end, was prepared by PCR with P703P and the primers of SEQ ID NO: 614 and 615. The cDNA for the fusion of P703P with the truncated form of PSA (referred to as FOPP) was then obtained by PCR using the modified P703P cDNA and the truncated form of PSA cDNA as templates and the primers of SEQ ID NO: 614 and 615. The FOPP cDNA was cloned into the NdeI site and XhoI site of the expression vector pCRX1, and confirmed by DNA sequencing. The determined cDNA sequence for the fusion construct FOPP is provided in SEQ ID NO: 616, with the amino acid sequence being provided in SEQ ID NO: 617.

[1125] The fusion FOPP was expressed as a single recombinant protein in E. coli as follows. The expression plasmid pCRX1FOPP was transformed into the E. coli strain BL21-CodonPlus RIL. The transformant was shown to express FOPP protein upon induction with 1 mM IPTG. The culture of the corresponding expression clone was inoculated into 25 ml LB broth containing 50 ug/ml kanamycin and 34 ug/ml chloramphenicol, grown at 37° C. to OD600 of about 1, and stored at 4° C. overnight. The culture was diluted into 1 liter of TB LB containing 50 ug/ml kanamycin and 34 ug/ml chloramphenicol, and grown at 37° C. to OD600 of 0.4. IPTG was added to a final concentration of 1 mM, and the culture was incubated at 30° C. for 3 hours. The cells were pelleted by centrifugation at 5,000 RPM for 8 min. To purify the protein, the cell pellet was suspended in 25 ml of 10 mM Tris-Cl pH 8.0, 2 mM PMSF, complete protease inhibitor and 15 ug lysozyme. The cells were lysed at 4° C. for 30 minutes, sonicated several times and the lysate centrifuged for 30 minutes at 10,000× g. The precipitate, which contained the inclusion body, was washed twice with 10 mM Tris-Cl pH 8.0 and 1% CHAPS. The inclusion body was dissolved in 40 ml of 10 mM Tris-Cl pH 8.0, 100 mM sodium phosphate and 8 M urea. The solution was bound to 8 ml Ni-NTA (Qiagen) for one hour at room temperature. The mixture was poured into a 25 ml column and washed with 50 ml of 10 mM Tris-Cl pH 6.3, 100 mM sodium phosphate, 0.5% DOC and 8M urea. The bound protein was eluted with 350 mM imidazole, 10 mM Tris-Cl pH 8.0, 100 mM sodium phosphate and 8 M urea. The fractions containing FOPP proteins were combined and dialyzed extensively against 10 mM Tris-Cl pH 4.6, aliquoted and stored at −70° C.

### EXAMPLE 22

### Real-time PCR Characterization of the Prostate-specific Antigen P501S in Peripheral Blood of Prostate Cancer Patients

[1126] Circulating epithelial cells were isolated from fresh blood of normal individuals and metastatic prostate cancer patients, mRNA isolated and cDNA prepared using real-time PCR procedures. Real-time PCR was performed with the Taqman™ procedure using both gene specific primers and probes to determine the levels of gene expression.

[1127] Epithelial cells were enriched from blood samples using an immunomagnetic bead separation method (Dynal A.S., Oslo, Norway). Isolated cells were lysed and the magnetic beads removed. The lysate was then processed for poly A+ mRNA isolation using magnetic beads coated with Oligo(dT)25. After washing the beads in buffer, bead/poly A+ RNA samples were suspended in 10 mM Tris HCl pH 8.0 and subjected to reversed transcription. The resulting cDNA was subjected to real-time PCR using gene specific primers. Beta-actin content was also determined and used for normalization. Samples with P501 Scopies greater than the mean of the normal samples + 3 standard deviations were considered positive. Real time PCR on blood samples was performed using the Taqman™ procedure but extending to 50 cycles using forward and reverse primers and probes specific for P501S. Of the eight samples tested, 6 were positive for P501S and β-actin signal. The remaining 2 samples had no detectable β-actin or P501S. No P501S signal was observed in the four normal blood samples tested.

### EXAMPLE 23

### Expression of the Prostate-specific Antigens P703P and P501S in SCID Mouse-passaged Prostate Tumors

[1128] When considering the effectiveness of antigens in the treatment of prostate cancer, the continued presence of the antigens in tumors during androgen ablation therapy is important. The presence of the prostate-specific antigens P703P and P501S in prostate tumor samples grown in SCID mice in the presence of testosterone was evaluated as follows.

[1129] Two prostate tumors that had metastasized to the bone were removed from patients, implanted into SCID mice and grown in the presence of testosterone. Tumors were evaluated for mRNA expression of P703P, P501S and PSA using quantitative real time PCR with the SYBR green assay method. Expression of P703P and P501S in a prostate tumor was used as a positive control and the absence in normal intestine and normal heart as negative controls. In both cases, the specific mRNA was present in late passage tumors. Since the bone metastases were grown in the presence of testosterone, this implies that the presence of these genes would not be lost during androgen ablation therapy.

### EXAMPLE 24

### ANTI-P503S Monoclonal Antibody Inhibits Tumor Growth In Vivo

[1130] The ability of the anti-P503S monoclonal antibody 20D4 to suppress tumor formation in mice was examined as follows.

[1131] Ten SCID mice were injected subcutaneously with HEK293 cells that expressed P503S. Five mice received 150 micrograms of 20D4 intravenously at day 0 (time of tumor cell injection), day 5 and day 9. Tumor size was measured for 50 days. Of the five animals that received no 20D4, three formed detectable tumors after about 2 weeks which continued to enlarge throughout the study. In contrast, none of the five mice that received 20D4 formed tumors. These results demonstrate that the anti-P503S Mab 20D4 displays potent anti-tumor activity in vivo.

### EXAMPLE 25

### Characterization of a T Cell Receptor Clone from a P501S-specific T Cell Clone

[1132] T cells have a limited lifespan. However, cloning of T cell receptor (TCR) chains and subsequent transfer essentially enables infinite propagation of the T cell specificity. Cloning of tumor-antigen TCR chains allows the transfer of the specificity into T cells isolated from patients that share the TCR MHC-restricting allele. Such T cells could then be expanded and used in adoptive transfer settings to introduce the tumor antigen specificity into patients carrying tumors that express the antigen. T cell receptor alpha and beta chains from a CD8 T cell clone specific for the prostate-specific antigen P501S were isolated and sequenced as follows.

[1133] Total MRNA from 2×10⁶ cells from CTL clone 4E5 (described above in Example 12) was isolated using Trizol reagent and cDNA was synthesized. To determine Va and Vb sequences in this clone, a panel of Va and Vb subtype-specific primers was synthesized and used in RT-PCR reactions with cDNA generated from each of the clones. The RT-PCR reactions demonstrated that each of the clones expressed a common Vb sequence that corresponded to the Vb7 subfamily. Futhermore, using cDNA generated from the clone, the Va sequence expressed was determined to be Va6. To clone the full TCR alpha and beta chains from clone 4E5, primers were designed that spanned the initiator and terninator-coding TCR nucleotides. The primers were as follows: TCR Valpha-6 5′(sense): GGATCC—GCCGCCACC—ATGTCACTTTCTAGCCTGCT (SEQ ID NO: 899) BamHI site Kozak TCR alpha sequence TCR alpha 3′ (antisense): GTCGAC—TCAGCTGGACCACAGCCGCAG (SEQ ID NO: 900) Sa1I site TCR alpha constant sequence TCR Vbeta-7. 5′(sense): GGATCC—GCCGCCACC—ATGGGCTGCAGGCTGCTCT (SEQ ID NO: 901) BamHI site Kozak TCR alpha sequence TCR beta 3′ (antisense): GTCGAC—TCAGAAATCCTTTCTCTTGAC (SEQ ID NO: 902) Sa1I site TCR beta constant sequence. Standard 35 cycle RT-PCR reactions were established using cDNA synthesized from the CTL clone and the above primers, employing the proofreading thermostable polymerase PWO (Roche, Nutley, N.J.).

[1134] The resultant specific bands (approx. 850 bp for alpha and approx. 950 for beta) were ligated into the PCR blunt vector (Invitrogen) and transformed into E. coli. E .coli transformed with plasmids containing full-length alpha and beta chains were identified, and large scale preparations of the corresponding plasmids were generated. Plasmids containing full-length TCR alpha and beta chains were submitted for sequencing. The sequencing reactions demonstrated the cloning of full-length TCR alpha and beta chains with the determined cDNA sequences for the Vb and Va chains being shown in SEQ ID NO: 903 and 904, respectively. The corresponding amino acid sequences are shown in SEQ ID NO: 905 and 906, respectively. The Va sequence was shown by nucleotide sequence alignment to be 99% identical (347/348) to Va6.2, and the Vb to be 99% identical to Vb7 (336/338).

### EXAMPLE 26

### Capture of Prostate Specific Cells Using the Prostate Antigen P503S

[1135] As described above, P503S is found on the surface of prostate cells. Secondary coated microsphere beads specific for mouse IgG were coupled with the purified P503S-specific monoclonal antibody 1D12. The bound P503S antibody was then used to capture HEK cells expressing recombinant P503S. This provides a model system for prostate-specific cell capture which may be usefully employed in the detection of prostate cells in blood, and therefore in the detection of prostate cancer.

[1136] P503S-transfected HEK cells were harvested and redissolved in wash buffer (PBS, 0.1% BSA, 0.6% sodium citrate) at an appropriate volume to give at least 54 cells per sample. Round bottom Eppendorf tubes were used for all procedures involving beads. The stock concentrations were as shown below in Table VIII.

TABLE VIII

| Stock concentrations | Sample concentration | Amount needed |
|---|---|---|
| Epithelial enrich beads 4⁸ | 1⁷ beads/ml | 125 ul stock per 5 ml |
| beads/mi (Dynal Biotech | | volume |
| Thc. Lake Success, NY) | | |
| 1D12 ascites antibody 2 | 0.1 ug/ml (0.1X) to | 0.05 ul to 2.5 ul stock |
| mg/ml | 5 ug/ml (5X) titrations | per sample |
| α-Mamma Mu | 1 ug/ml (1X) | 1.1 ul stock per sample |
| 0.9 mg/ml | | |
| Pan-mouse IgG beads 48 | 1⁷ beads/ml | 125 ul stock per 5 ml |
| beads/ml (Dynal Biotech) | | volume |

[1137] Blocked immunomagnetic beads were pre-washed as follows: all beads needed were pooled and washed once with 1 ml wash buffer. The beads were resuspended din a 3× volume of 1% BSA (v/v) in wash buffer and incubated for 15 min rotating at 4° C. The beads were then washed three times with 2× volume of wash buffer and resuspended to original volume. Non-blocked beads were pooled, washed three times with 2× volume of wash buffer and resuspended to original volume.

[1138] Primary antibody was incubated with secondary beads in a fresh Eppendorf for 30 minutes, rotating at 4° C. Approximately 200 ul wash buffer was added to increase the total volume for even mixing of the sample. The antibody-bead solution was transferred to a fresh Eppendorf, washed twice with an equal volume of wash buffer and resuspended to original volume. Target cells were added to each sample and incubated for 45 minutes, rotating at 4° C. The tubes were transferred to a magnet, the supernatant removed, taking care not the agitate the beads, and the samples were washed twice with 1 ml wash buffer. The samples were then ready for RT-PCR using a Dynabeads mRNA direct microkit (Dynal Biotech).

[1139] Epithelial cell enrichment was placed in a magnet and supernant was removed. The epithelial enrichment beads were then resuspendedin 100 ul lysis/binding buffer fortified with Rnasin (2 U/ul per sample), and sotred at −70° C. until use. Oligo (dT₂₅) Dynabeads were pre-washed as follows: all beads needed were pooled (23 ul/sample), washed three times with an excess volume of lysis/binding buffer, and resuspsended ot original volume. The lysis supernant was separated with a magnet and transferred to a fresh Eppendorf. 20 ul oligo(dT25) Dynabeads were added per samplem ad rolled for 5 min at room temperature. Supemant was separated using a magnet and discarded, leaving the mRNA annealed ot the beads. The bead/mRNA complex was washed with buffer and resuspended in cold Tris-HCl.

[1140] For RT-PCR, the Tris-HCI supernatant was separated and discarded using MPS. For each sample containing 1⁵ cells or less, the following was added to give a total volume of 30 ul: 14.25 ul H₂O; 1.5 ul BSA; 6 ul first strand buffer; 0.75 mL 10 mM dNTP mix; 3 ul Rnasin; 3 ul 0.1M dTT; and 1.5 ul Superscript II. The resulting solution was incubated for 1 hour at 42° C., diluted 1:5 in H2O, heated at 80° C. for 2 min to detach cDNA from the beads, and immediately placed on MPS. The supernatant containing cDNA was transferred to a new tube and stored at −20° C.

[1141] Table IX shows the percentage of capture of P503S-transfected HEK cells as determined by RT-PCR.

TABLE IX

| | % capture P503S-transfected | % capture |
|---|---|---|
| | HEK cells | LnCAP cells |
| 0.1 ug/ml P503S Mab | 36.90 | 0.00 |
| 0.5 ug/ml P503S Mab | 67.40 | 2.93 |
| 1 ug/ml P503S Mab | 40.22 | 0.00 |
| 5 ug/ml P503S Mab | 13.11 | 0.00 |
| Anti-Mu beads only, non- | 1.42 | 0.00 |
| blocked | | |
| Anti-Mu beads only, | 15.65 | 20.21 |
| blocked | | |
| Absolute control, non- | 100.00 | 100.00 |
| capture cells | | |

[1142] From the foregoing it will be appreciated that, although specific embodiments of the invention have been described herein for purposes of illustration, various modifications may be made without deviating from the spirit and scope of the invention. Accordingly, the invention is not limited except as by the appended claims.

What is claimed:

1. An isolated polynucleotide comprising a sequence selected from the group consisting of:
(a) sequences provided in SEQ ID NO: 1-111, 115-171, 173-175, 177, 179-305, 307-315, 326, 328, 330, 332-335, 340-375, 381, 382 and 384-476, 524, 526, 530, 531, 533, 535, 536, 552, 569-572, 587, 591, 593-606, 618-705, 709-774, 777, 789, 817, 823, 824, 878, 880-882, 894, 896, 907, 908, 916-919, 929-931, 938, 939 and 942;
(b) complements of the sequences provided in SEQ ID NO: 1-111, 115-171, 173-175, 177, 179-305, 307-315, 326, 328, 330, 332-335, 340-375, 381, 382 and 384-476, 524, 526, 530, 531, 533, 535, 536, 552, 569-572, 587, 591, 593-606, 618-705, 709-774, 777, 789, 817, 823, 824, 878, 880-882, 894, 896, 907, 908, 916-919, 929-931, 938, 939 and 942;
(c) sequences consisting of at least 20 contiguous residues of a sequence provided in SEQ ID NO: 1-111, 115-171, 173-175, 177, 179-305, 307-315, 326, 328, 330, 332-335, 340-375, 381, 382 and 384-476, 524, 526, 530, 531, 533, 535, 536, 552, 569-572, 587, 591, 593-606, 618-705, 709-774, 777, 789, 817, 823, 824, 878, 880-882, 894, 896, 907, 908, 916-919, 929-931, 938, 939 and 942;
(d) sequences that hybridize to a sequence provided in SEQ ID NO: 1-111, 115-171, 173-175, 177, 179-305, 307-315, 326, 328, 330, 332-335, 340-375, 381, 382 and 384-476, 524, 526, 530, 531, 533, 535, 536, 552, 569-572, 587, 591, 593-606, 618-705, 709-774, 777, 789, 817, 823, 824, 878, 880-882, 894, 896, 907, 908, 916-919, 929-931, 938, 939 and 942 under moderately stringent conditions;
(e) sequences having at least 75% identity to a sequence of SEQ ID NO: 1-111, 115-171, 173-175, 177, 179-305, 307-315, 326, 328, 330, 332-335, 340-375, 381, 382 and 384-476, 524, 526, 530, 531, 533, 535, 536, 552, 569-572, 587, 591, 593-606, 618-705, 709-774, 777, 789, 817, 823, 824, 878, 880-882, 894, 896, 907, 908, 916-919, 929-931, 938, 939 and 942;
(f) sequences having at least 90% identity to a sequence of SEQ ID NO: 1-111, 115-171, 173-175, 177, 179-305, 307-315, 326, 328, 330, 332-335, 340-375, 381, 382 and 384-476, 524, 526, 530, 531, 533, 535, 536, 552, 569-572, 587, 591, 593-606, 618-705, 709-774, 777, 789, 817, 823, 824, 878, 880-882, 894, 896, 907, 908, 916-919, 929-931, 938, 939 and 942; and
(g) degenerate variants of a sequence provided in SEQ ID NO: 1-111, 115-171, 173-175, 177, 179-305, 307-315, 326, 328, 330, 332-335, 340-375, 381, 382 and 384-476, 524, 526, 530, 531, 533, 535, 536, 552, 569-572, 587, 591, 593-606, 618-705, 709-774, 777, 789, 817, 823, 824, 878, 880-882, 894, 896, 907, 908, 916-919, 929-931, 938, 939 and 942.

2. An isolated polypeptide comprising an amino acid sequence selected from the group consisting of:
(a) sequences recited in SEQ ID NO: 112-114, 172, 176, 178, 327, 329, 331, 336, 339, 376-380, 383, 477-483, 496, 504, 505, 519, 520, 522, 525, 527, 532, 534, 537-551, 553-568, 573-586, 588-590, 592, 706-708, 775, 776, 778, 780, 781, 811, 814, 818, 826, 827, 853, 855, 858, 860-862, 866-877, 879, 883-893, 895, 897, 898, 909-915, 920-928, 932-934, 940, 941 and 943;
(b) sequences having at least 70% identity to a sequence of SEQ ID NO: 112-114, 172, 176, 178, 327, 329, 331, 336, 339, 376-380, 383, 477-483, 496, 504, 505, 519, 520, 522, 525, 527, 532, 534, 537-551, 553-568, 573-586, 588-590, 592, 706-708, 775, 776, 778, 780, 781, 811, 814, 818, 826, 827, 853, 855, 858, 860-862, 866-877, 879, 883-893, 895, 897, 898, 909-915, 920-928, 932-934, 940, 941 and 943;
(c) sequences having at least 90% identity to a sequence of SEQ ID NO: 112-114, 172, 176, 178, 327, 329, 331, 336, 339, 376-380, 383, 477-483, 496, 504, 505, 519, 520, 522, 525, 527, 532, 534, 537-551, 553-568, 573-586, 588-590, 592, 706-708, 775, 776, 778, 780, 781, 811, 814, 818, 826, 827, 853, 855, 858, 860-862, 866-877, 879, 883-893, 895, 897, 898, 909-915, 920-928, 932-934, 940, 941 and 943;
(d) sequences encoded by a polynucleotide of claim 1;
(e) sequences having at least 70% identity to a sequence encoded by a polynucleotide of claim 1; and
(f) sequences having at least 90% identity to a sequence encoded by a polynucleotide of claim 1.

3. An expression vector comprising a polynucleotide of claim 1 operably linked to an expression control sequence.

4. A host cell transformed or transfected with an expression vector according to claim 3.

5. An isolated antibody, or antigen-binding fragment thereof, that specifically binds to a polypeptide of claim 2.

6. A method for detecting the presence of a cancer in a patient, comprising the steps of:
(a) obtaining a biological sample from the patient;
(b) contacting the biological sample with a binding agent that binds to a polypeptide of claim 2;
(c) detecting in the sample an amount of polypeptide that binds to the binding agent; and
(d) comparing the amount of polypeptide to a predetermined cut-off value and therefrom determining the presence of a cancer in the patient.

7. A fusion protein comprising at least one polypeptide according to claim 2.

8. An oligonucleotide that hybridizes to a sequence recited in SEQ ID NO: 1-111, 115-171, 173-175, 177, 179-305, 307-315, 326, 328, 330, 332-335, 340-375, 381, 382 and 384-476, 524, 526, 530, 531, 533, 535, 536, 552, 569-572, 587, 591, 593-606, 618-705, 709-774, 777, 789, 817, 823, 824, 878, 880-882, 894, 896, 907, 908, 916-919, 929-931, 938, 939 and 942 under moderately stringent conditions.

9. A method for stimulating and/or expanding T cells specific for a tumor protein, comprising contacting T cells with at least one component selected from the group consisting of:
(a) polypeptides according to claim 2;
(b) polynucleotides according to claim 1; and
(c) antigen-presenting cells that express a polypeptide according to claim 2,
under conditions and for a time sufficient to permit the stimulation and/or expansion of T cells.

10. An isolated T cell population, comprising T cells prepared according to the method of claim 9.

11. A composition comprising a first component selected from the group consisting of physiologically acceptable carriers and immunostimulants, and a second component selected from the group consisting of:
(a) polypeptides according to claim 2;
(b) polynucleotides according to claim 1;
(c) antibodies according to claim 5;
(d) fusion proteins according to claim 7;
(e) T cell populations according to claim 10; and
(f) antigen presenting cells that express a polypeptide according to claim 2.

12. A method for stimulating an immune response in a patient, comprising administering to the patient a composition of claim 11.

13. A method for the treatment of a cancer in a patient, comprising administering to the patient a composition of claim 11.

14. A method for determining the presence of a cancer in a patient, comprising the steps of:
(a) obtaining a biological sample from the patient;
(b) contacting the biological sample with an oligonucleotide according to claim 8;
(c) detecting in the sample an amount of a polynucleotide that hybridizes to the oligonucleotide; and
(d) compare the amount of polynucleotide that hybridizes to the oligonucleotide to a predetermined cut-off value, and therefrom determining the presence of the cancer in the patient.

15. A diagnostic kit comprising at least one oligonucleotide according to claim 8.

16. A diagnostic kit comprising at least one antibody according to claim 5 and a detection reagent, wherein the detection reagent comprises a reporter group.

17. A method for inhibiting the development of a cancer in a patient, comprising the steps of:
(a) incubating CD4+ and/or CD8+ T cells isolated from a patient with at least one component selected from the group consisting of: (i) polypeptides according to claim 2; (ii) polynucleotides according to claim 1; and (iii) antigen presenting cells that express a polypeptide of claim 2, such that T cell proliferate;
(b) administering to the patient an effective amount of the proliferated T cells,
and thereby inhibiting the development of a cancer in the patient.

The application's sequence listing, which the Patent Office published only in electronic form, follows.

SEQUENCE LISTING (943 sequences)

SEQ ID NO: 1 - DNA, 814 bp, Homo sapien
  misc_feature (1)...(814): n = A,T,C or G
tttttttttttttttcacagtataacagctctttatttctgtgagttctactaggaaatcatcaaatctgagggttgtctggaggacttcaatacacctccccccatagtgaatcagcttccagggggtccagtccctctccttacttcatccccatcccatgccaaaggaagaccctccctccttggctcacagccttctctaggcttcccagtgcctccaggacagagtgggttatgttttcagctccatccttgctgtgagtgtctggtgcgttgtgcctccagcttctgctcagtgcttcatggacagtgtccagcacatgtcactctccactctctcagtgtggatccactagttctagagcggccgccaccgcggtggagctccagcttttgttccctttagtgagggttaattgcgcgcttggcgtaatcatggtcataactgtttcctgtgtgaaattgttatccgctcacaattccacacaacatacgagccggaagcataaagtgtaaagcctggggtgcctaatgagtganctaactcacattaattgcgttgcgctcactgnccgctttccagtcnggaaaactgtcgtgccagctgcattaatgaatcggccaacgcncggggaaaagcggtttgcgttttgggggctcttccgcttctcgctcactnantcctgcgctcggtcnttcggctgcggggaacggtatcactcctcaaaggnggtattacggttatccnnaaatcnggggatacccnggaaaaaantttaacaaaagggcancaaagggcngaaacgtaaaaa

SEQ ID NO: 2 - DNA, 816 bp, Homo sapien
  misc_feature (1)...(816): n = A,T,C or G
acagaaatgttggatggtggagcacctttctatacgacttacaggacagcagatggggaattcatggctgttggagcaatagaaccccagttctacgagctgctgatcaaaggacttggactaaagtctgatgaacttcccaatcagatgagcatggatgattggccagaaatgaagaagaagtttgcagatgtatttgcaaagaagacgaaggcagagtggtgtcaaatctttgacggcacagatgcctgtgtgactccggttctgacttttgaggaggttgttcatcatgatcacaacaaggaacggggctcgtttatcaccagtgaggagcaggacgtgagcccccgccctgcacctctgctgttaaacaccccagccatcccttctttcaaaagggatccactagttctagaagcggccgccaccgcggtggagctccagcttttgttccctttagtgagggttaattgcgcgcttggcgtaatcatggtcatagctgtttcctgtgtgaaattgttatccgctcacaattcccccaacatacgagccggaacataaagtgttaagcctggggtgcctaatgantgagctaactcncattaattgcgttgcgctcactgcccgctttccagtcgggaaaactgtcgtgccactgcnttantgaatcngccaccccccgggaaaaggcggttgcnttttgggcctcttccgctttcctcgctcattgatcctngcncccggtcttcggctgcggngaacggttcactcctcaaaggcggtntnccggttatccccaaacnggggatacccnga

SEQ ID NO: 3 - DNA, 773 bp, Homo sapien
  misc_feature (1)...(773): n = A,T,C or G
cttttgaaagaagggatggctggggtgtttaacagcagaggtgcagggcgggggctcacgtcctgctcctcactggtgataaacgagccccgttccttgttgtgatcatgatgaacaacctcctcaaaagtcagaaccggagtcacacaggcatctgtgccgtcaaagatttgacaccactctgccttcgtcttctttgcaaatacatctgcaaacttcttcttcatttctggccaatcatccatgctcatctgattgggaagttcatcagactttagtccanntcctttgatcagcagctcgtagaactggggttctattgctccaacagccatgaattccccatctgctgtcctgtaagtcgtatagaaaggtgctccaccatccaacatgttctgtcctcgagggggggcccggtacccaattcgccctatantgagtcgtattacgcgcgctcactggccgtcgttttacaacgtcgtgactgggaaaaccctgggcgttaccaacttaatcgccttgcagcacatccccctttcgccagctgggcgtaatancgaaaaggcccgcaccgatcgcccttccaacagttgcgcacctgaatgggnaaatgggacccccctgttaccgcgcattnaacccccgcngggtttngttgttacccccacntnnaccgcttacactttgccagcgccttancgcccgctccctttcncctttcttcccttcctttcncnccnctttcccccggggtttcccccntcaaaccccna

SEQ ID NO: 4 - DNA, 828 bp, Homo sapien
  misc_feature (1)...(828): n = A,T,C or G
cctcctgagtcctactgacctgtgctttctggtgtggagtccagggctgctaggaaaaggaatgggcagacacaggtgtatgccaatgtttctgaaatgggtataatttcgtcctctccttcggaacactggctgtctctgaagacttctcgctcagtttcagtgaggacacacacaaagacgtgggtgaccatgttgtttgtggggtgcagagatgggaggggtggggcccaccctggaagagtggacagtgacacaaggtggacactctctacagatcactgaggataagctggagccacaatgcatgaggcacacacacagcaaggatgacnctgtaaacatagcccacgctgtcctgngggcactgggaagcctanatnaggccgtgagcanaaagaaggggaggatccactagttctanagcggccgccaccgcggtgganctccancttttgttccctttagtgagggttaattgcgcgcttggcntaatcatggtcatanctntttcctgtgtgaaattgttatccgctcacaattccacacaacatacganccggaaacataaantgtaaacctggggtgcctaatgantgactaactcacattaattgcgttgcgctcactgcccgctttccaatcnggaaacctgtcttgccncttgcattnatgaatcngccaacccccggggaaaagcgtttgcgttttgggcgctcttccgcttcctcnctcanttantccctncnctcggtcattccggctgcngcaaaccggttcaccncctccaaagggggtattccggtttccccnaatccgggganancc

SEQ ID NO: 5 - DNA, 834 bp, Homo sapien
  misc_feature (1)...(834): n = A,T,C or G
tttttttttttttttactgatagatggaatttattaagcttttcacatgtgatagcacatagttttaattgcatccaaagtactaacaaaaactctagcaatcaagaatggcagcatgttattttataacaatcaacacctgtggcttttaaaatttggttttcataagataatttatactgaagtaaatctagccatgcttttaaaaaatgctttaggtcactccaagcttggcagttaacatttggcataaacaataataaaacaatcacaatttaataaataacaaatacaacattgtaggccataatcatatacagtataaggaaaaggtggtagtgttgagtaagcagttattagaatagaataccttggcctctatgcaaatatgtctagacactttgattcactcagccctgacattcagttttcaaagtaggagacaggttctacagtatcattttacagtttccaacacattgaaaacaagtagaaaatgatgagttgatttttattaatgcattacatcctcaagagttatcaccaacccctcagttataaaaaattttcaagttatattagtcatataacttggtgtgcttattttaaattagtgctaaatggattaagtgaagacaacaatggtcccctaatgtgattgatattggtcatttttaccagcttctaaatctnaactttcaggcttttgaactggaacattgnatnacagtgttccanagttncaacctactggaacattacagtgtgcttgattcaaaatgttattttgttaaaaattaaattttaacctggtggaaaaataatttgaaatna

SEQ ID NO: 6 - DNA, 818 bp, Homo sapien
  misc_feature (1)...(818): n = A,T,C or G
ttttttttttttttttttttaagaccctcatcaatagatggagacatacagaaatagtcaaaccacatctacaaaatgccagtatcaggcggcggcttcgaagccaaagtgatgtttggatgtaaagtgaaatattagttggcggatgaagcagatagtgaggaaagttgagccaataatgacgtgaagtccgtggaagcctgtggctacaaaaaatgttgagccgtagatgccgtcggaaatggtgaagggagactcgaagtactctgaggcttgtaggagggtaaaatagagacccagtaaaattgtaataagcagtgcttgaattatttggtttcggttgttttctattagactatggtgagctcaggtgattgatactcctgatgcgagtaatacggatgtgtttaggagtgggacttctaggggatttagcggggtgatgcctgttgggggccagtgccctcctagttggggggtaggggctaggctggagtggtaaaaggctcagaaaaatcctgcgaagaaaaaaacttctgaggtaataaataggattatcccgtatcgaaggcctttttggacaggtggtgtgtggtggccttggtatgtgctttctcgtgttacatcgcgccatcattggtatatggttagtgtgttgggttantanggcctantatgaagaacttttggantggaattaaatcaatngcttggccggaagtcattanganggctnaaaaggccctgttangggtctgggctnggttttacccnacccatggaatncnccccccggacnantgnatccctattcttaa

SEQ ID NO: 7 - DNA, 817 bp, Homo sapien
  misc_feature (1)...(817): n = A,T,C or G
tttttttttttttttttttttggctctagagggggtagagggggtgctatagggtaaatacgggccctatttcaaagatttttaggggaattaattctaggacgatgggtatgaaactgtggtttgctccacagatttcagagcattgaccgtagtatacccccggtcgtgtagcggtgaaagtggtttggtttagacgtccgggaattgcatctgtttttaagcctaatgtggggacagctcatgagtgcaagacgtcttgtgatgtaattattatacnaatgggggcttcaatcgggagtactactcgattgtcaacgtcaaggagtcgcaggtcgcctggttctaggaataatgggggaagtatgtaggaattgaagattaatccgccgtagtcggtgttctcctaggttcaataccattggtggccaattgatttgatggtaaggggagggatcgttgaactcgtctgttatgtaaaggatnccttngggatgggaaggcnatnaaggactanggatnaatggcgggcangatatttcaaacngtctctanttcctgaaacgtctgaaatgttaataanaattaantttngttattgaatnttnnggaaaagggcttacaggactagaaaccaaatangaaaantaatnntaanggcnttatcntnaaaggtnataaccnctcctatnatcccacccaatngnattccccacncnnacnattggatnccccanttccanaaanggccnccccccggtgnannccnccttttgttcccttnantganggttattcncccctngcnttatcancc

SEQ ID NO: 8 - DNA, 799 bp, Homo sapien
  misc_feature (1)...(799): n = A,T,C or G
catttccgggtttactttctaaggaaagccgagcggaagctgctaacgtgggaatcggtgcataaggagaactttctgctggcacgcgctagggacaagcgggagagcgactccgagcgtctgaagcgcacgtcccagaaggtggacttggcactgaaacagctgggacacatccgcgagtacgaacagcgcctgaaagtgctggagcgggaggtccagcagtgtagccgcgtcctggggtgggtggccgangcctganccgctctgccttgctgcccccangtgggccgccaccccctgacctgcctgggtccaaacactgagccctgctggcggacttcaagganaacccccacanggggattttgctcctanantaaggctcatctgggcctcggcccccccacctggttggccttgtctttgangtgagccccatgtccatctgggccactgtcnggaccacctttngggagtgttctccttacaaccacannatgcccggctcctcccggaaaccantcccancctgngaaggatcaagncctgnatccactnntnctanaaccggccnccnccgcngtggaacccnccttntgttccttttcnttnagggttaatnncgccttggccttnccanngtcctncncnttttccnntgttnaaattgttangcncccnccnntcccncnncnncnancccgacccnnannttnnannncctgggggtnccnncngattgacccnnccnccctntanttgcnttngggnncnntgcccctttccctctnggganncg

SEQ ID NO: 9 - DNA, 801 bp, Homo sapien
  misc_feature (1)...(801): n = A,T,C or G
acgccttgatcctcccaggctgggactggttctgggaggagccgggcatgctgtggtttgtaangatgacactcccaaaggtggtcctgacagtggcccagatggacatggggctcacctcaaggacaaggccaccaggtgcgggggccgaagcccacatgatccttactctatgagcaaaatcccctgtgggggcttctccttgaagtccgccancagggctcagtctttggacccangcaggtcatggggttgtngnccaactgggggccncaacgcaaaanggcncagggcctcngncacccatcccangacgcggctacactnctggacctcccnctccaccactttcatgcgctgttcntacccgcgnatntgtcccanctgtttcngtgccnactccancttctnggacgtgcgctacatacgcccggantcncnctcccgctttgtccctatccacgtnccancaacaaatttcnccntantgcaccnattcccacntttnncagntttccncnncgngcttccttntaaaagggttganccccggaaaatnccccaaagggggggggccnggtacccaactnccccctnatagctgaantccccatnaccnngnctcnatgganccntccnttttaannacnttctnaacttgggaananccctcgnccntncccccnttaatcccnccttgcnangnncntcccccnntccncccnnntnggcntntnanncnaaaaaggcccnnnancaatctcctnncncctcanttcgccanccctcgaaatcggccnc

SEQ ID NO: 10 - DNA, 789 bp, Homo sapien
  misc_feature (1)...(789): n = A,T,C or G
cagtctatntggccagtgtggcagctttccctgtggctgccggtgccacatgcctgtcccacagtgtggccgtggtgacagcttcagccgccctcaccgggttcaccttctcagccctgcagatcctgccctacacactggcctccctctaccaccgggagaagcaggtgttcctgcccaaataccgaggggacactggaggtgctagcagtgaggacagcctgatgaccagcttcctgccaggccctaagcctggagctcccttccctaatggacacgtgggtgctggaggcagtggcctgctcccacctccacccgcgctctgcggggcctctgcctgtgatgtctccgtacgtgtggtggtgggtgagcccaccgangccagggtggttccgggccggggcatctgcctggacctcgccatcctggatagtgcttcctgctgtcccangtggccccatccctgtttatgggctccattgtccagctcagccagtctgtcactgcctatatggtgtctgccgcaggcctgggtctggtcccatttactttgctacacaggtantatttgacaagaacganttggccaaatactcagcgttaaaaaattccagcaacattgggggtggaaggcctgcctcactgggtccaactccccgctcctgttaaccccatggggctgccggcttggccgccaatttctgttgctgccaaantnatgtggctctctgctgccacctgttgctggctgaagtgcntacngcncanctnggggggtngggngttccc

SEQ ID NO: 11 - DNA, 772 bp, Homo sapien
  misc_feature (1)...(772): n = A,T,C or G
cccaccctacccaaatattagacaccaacacagaaaagctagcaatggattcccttctactttgttaaataaataagttaaatatttaaatgcctgtgtctctgtgatggcaacagaaggaccaacaggccacatcctgataaaaggtaagaggggggtggatcagcaaaaagacagtgctgtgggctgaggggacctggttcttgtgtgttgcccctcaggactcttcccctacaaataactttcatatgttcaaatcccatggaggagtgtttcatcctagaaactcccatgcaagagctacattaaacgaagctgcaggttaaggggcttanagatgggaaaccaggtgactgagtttattcagctcccaaaaacccttctctaggtgtgtctcaactaggaggctagctgttaaccctgagcctgggtaatccacctgcagagtccccgcattccagtgcatggaacccttctggcctccctgtataagtccagactgaaacccccttggaaggnctccagtcaggcagccctanaaactggggaaaaaagaaaaggacgccccancccccagctgtgcanctacgcacctcaacagcacagggtggcagcaaaaaaaccactttactttggcacaaacaaaaactngggggggcaaccccggcaccccnangggggttaacaggaancngggnaacntggaacccaattnaggcaggcccnccaccccnaatnttgctgggaaatttttcctcccctaaattntttc

SEQ ID NO: 12 - DNA, 751 bp, Homo sapien
  misc_feature (1)...(751): n = A,T,C or G
gccccaattccagctgccacaccacccacggtgactgcattagttcggatgtcatacaaaagctgattgaagcaaccctctactttttggtcgtgagccttttgcttggtgcaggtttcattggctgtgttggtgacgttgtcattgcaacagaatgggggaaaggcactgttctctttgaagtanggtgagtcctcaaaatccgtatagttggtgaagccacagcacttgagccctttcatggtggtgttccacacttgagtgaagtcttcctgggaaccataatctttcttgatggcaggcactaccagcaacgtcagggaagtgctcagccattgtggtgtacaccaaggcgaccacagcagctgcnacctcagcaatgaagatgangaggangatgaagaagaacgtcncgagggcacacttgctctcagtcttancaccatancagcccntgaaaaccaanancaaagaccacnacnccggctgcgatgaagaaatnaccccncgttgacaaacttgcatggcactggganccacagtggcccnaaaaatcttcaaaaaggatgccccatcnattgaccccccaaatgcccactgccaacaggggctgccccacncncnnaacgatganccnattgnacaagatctncntggtcttnatnaacntgaaccctgcntngtggctcctgttcaggnccnnggcctgacttctnaannaangaactcngaagnccccacnggananncg

SEQ ID NO: 13 - DNA, 729 bp, Homo sapien
  misc_feature (1)...(729): n = A,T,C or G
gagccaggcgtccctctgcctgcccactcagtggcaacacccgggagctgttttgtcctttgtggancctcagcagtnccctctttcagaactcantgccaaganccctgaacaggagccaccatgcagtgcttcagcttcattaagaccatgatgatcctcttcaatttgctcatctttctgtgtggtgcagccctgttggcagtgggcatctgggtgtcaatcgatggggcatcctttctgaagatcttcgggccactgtcgtccagtgccatgcagtttgtcaacgtgggctacttcctcatcgcagccggcgttgtggtcttagctctaggtttcctgggctgctatggtgctaagactgagagcaagtgtgccctcgtgacgttcttcttcatcctcctcctcatcttcattgctgaggttgcaatgctgtggtcgccttggtgtacaccacaatggctgagcacttcctgacgttgctggtaatgcctgccatcaanaaaagattatgggttcccaggaanacttcactcaagtgttggaacaccaccatgaaagggctcaagtgctgtggcttcnnccaactatacggattttgaagantcacctacttcaaagaaaanagtgcctttcccccatttctgttgcaattgacaaacgtccccaacacagccaattgaaaacctgcacccaacccaaangggtccccaaccanaaattnaaggg

SEQ ID NO: 14 - DNA, 816 bp, Homo sapien
  misc_feature (1)...(816): n = A,T,C or G
tgctcttcctcaaagttgttcttgttgccataacaaccaccataggtaaagcgggcgcagtgttcgctgaaggggttgtagtaccagcgcgggatgctctccttgcagagtcctgtgtctggcaggtccacgcagtgccctttgtcactggggaaatggatgcgctggagctcgtcaaagccactcgtgtatttttcacaggcagcctcgtccgacgcgtcggggcagttgggggtgtcttcacactccaggaaactgtcnatgcagcagccattgctgcagcggaactgggtgggctgacangtgccagagcacactggatggcgcctttccatgnnangggccctgngggaaagtccctganccccananctgcctctcaaangccccaccttgcacaccccgacaggctagaatggaatcttcttcccgaaaggtagttnttcttgttgcccaanccanccccntaaacaaactcttgcanatctgctccgngggggtcntantaccancgtgggaaaagaaccccaggcngcgaaccaancttgtttggatncgaagcnataatctnctnttctgcttggtggacagcaccantnactgtnnanctttagnccntggtcctcntgggttgnncttgaacctaatcnccnntcaactgggacaaggtaantngccntcctttnaattcccnancntnccccctggtttggggttttncncnctcctaccccagaaannccgtgttcccccccaactaggggccnaaaccnnttnttccacaaccctnccccacccacgggttcngntggttng

SEQ ID NO: 15 - DNA, 783 bp, Homo sapien
  misc_feature (1)...(783): n = A,T,C or G
ccaaggcctgggcaggcatanacttgaaggtacaaccccaggaacccctggtgctgaaggatgtggaaaacacagattggcgcctactgcggggtgacacggatgtcagggtagagaggaaagacccaaaccaggtggaactgtggggactcaaggaangcacctacctgttccagctgacagtgactagctcagaccacccagaggacacggccaacgtcacagtcactgtgctgtccaccaagcagacagaagactactgcctcgcatccaacaangtgggtcgctgccggggctctttcccacgctggtactatgaccccacggagcagatctgcaagagtttcgtttatggaggctgcttgggcaacaagaacaactaccttcgggaagaagagtgcattctancctgtcngggtgtgcaaggtgggcctttganangcanctctggggctcangcgactttcccccagggcccctccatggaaaggcgccatccantgttctctggcacctgtcagcccacccagttccgctgcancaatggctgctgcatcnacantttcctngaattgtgacaacaccccccantgcccccaaccctcccaacaaagcttccctgttnaaaaatacnccanttggcttttnacaaacncccggcncctccnttttccccnntnaacaaagggcnctngcntttgaactgcccnaacccnggaatctnccnnggaaaaantnccccccctggttcctnnaancccctccncnaaanctncccccccc

SEQ ID NO: 16 - DNA, 801 bp, Homo sapien
  misc_feature (1)...(801): n = A,T,C or G
gccccaattccagctgccacaccacccacggtgactgcattagttcggatgtcatacaaaagctgattgaagcaaccctctactttttggtcgtgagccttttgcttggtgcaggtttcattggctgtgttggtgacgttgtcattgcaacagaatgggggaaaggcactgttctctttgaagtagggtgagtcctcaaaatccgtatagttggtgaagccacagcacttgagccctttcatggtggtgttccacacttgagtgaagtcttcctgggaaccataatctttcttgatggcaggcactaccagcaacgtcaggaagtgctcagccattgtggtgtacaccaaggcgaccacagcagctgcaacctcagcaatgaagatgaggaggaggatgaagaagaacgtcncgagggcacacttgctctccgtcttagcaccatagcagcccangaaaccaagagcaaagaccacaacgccngctgcgaatgaaagaaantacccacgttgacaaactgcatggccactggacgacagttggcccgaanatcttcagaaaagggatgccccatcgattgaacacccanatgcccactgccnacagggctgcnccncncngaaagaatgagccattgaagaaggatcntcntggtcttaatgaactgaaaccntgcatggtggcccctgttcagggctcttggcagtgaattctganaaaaaggaacngcntnagcccccccaaanganaaaacacccccgggtgttgccctgaattggcggccaagganccctgccccng

SEQ ID NO: 17 - DNA, 740 bp, Homo sapien
  misc_feature (1)...(740): n = A,T,C or G
gtgagagccaggcgtccctctgcctgcccactcagtggcaacacccgggagctgttttgtcctttgtggagcctcagcagttccctctttcagaactcactgccaagagccctgaacaggagccaccatgcagtgcttcagcttcattaagaccatgatgatcctcttcaatttgctcatctttctgtgtggtgcagccctgttggcagtgggcatctgggtgtcaatcgatggggcatcctttctgaagatcttcgggccactgtcgtccagtgccatgcagtttgtcaacgtgggctacttcctcatcgcagccggcgttgtggtctttgctcttggtttcctgggctgctatggtgctaagacggagagcaagtgtgccctcgtgacgttcttcttcatcctcctcctcatcttcattgctgaagttgcagctgctgtggtcgccttggtgtacaccacaatggctgaaccattcctgacgttgctggtantgcctgccatcaanaaagattatgggttcccaggaaaaattcactcaantntggaacaccnccatgaaaagggctccaatttctgntggcttccccaactataccggaattttgaaagantcnccctacttccaaaaaaaaananttgcctttncccccnttctgttgcaatgaaaacntcccaanacngccaatnaaaacctgcccnnncaaaaaggntcncaaacaaaaaaantnnaagggttn

SEQ ID NO: 18 - DNA, 802 bp, Homo sapien
  misc_feature (1)...(802): n = A,T,C or G
ccgctggttgcgctggtccagngnagccacgaagcacgtcagcatacacagcctcaatcacaaggtcttccagctgccgcacattacgcagggcaagagcctccagcaacactgcatatgggatacactttactttagcagccagggtgacaactgagaggtgtcgaagcttattcttctgagcctctgttagtggaggaagattccgggcttcagctaagtagtcagcgtatgtcccataagcaaacactgtgagcagccggaaggtagaggcaaagtcactctcagccagctctctaacattgggcatgtccagcagttctccaaacacgtagacaccagnggcctccagcacctgatggatgagtgtggccagcgctgcccccttggccgacttggctaggagcagaaattgctcctggttctgccctgtcaccttcacttccgcactcatcactgcactgagtgtgggggacttgggctcaggatgtccagagacgtggttccgccccctcncttaatgacaccgnccanncaaccgtcggctcccgccgantgngttcgtcgtncctgggtcagggtctgctggccnctacttgcaancttcgtcnggcccatggaattcaccncaccggaactngtangatccactnnttctataaccggncgccaccgcnnntggaactccactcttnttncctttacttgagggttaaggtcacccttnncgttaccttggtccaaaccntnccntgtgtcganatngtnaatcnggnccnatnccanccncatangaagccng

SEQ ID NO: 19 - DNA, 731 bp, Homo sapien
  misc_feature (1)...(731): n = A,T,C or G
cnaagcttccaggtnacgggccgcnaancctgacccnaggtancanaangcagncngcgggagcccaccgtcacgnggnggngtctttatnggagggggcggagccacatcnctggacntcntgaccccaactccccnccncncantgcagtgatgagtgcagaactgaaggtnacgtggcaggaaccaagancaaannctgctccnntccaagtcggcnnagggggcggggctggccacgcncatccntcnagtgctgnaaagccccnncctgtctacttgtttggagaacngcnnngacatgcccagngttanataacnggcngagagtnantttgcctctcccttccggctgcgcancgngtntgcttagnggacataacctgactacttaactgaacccnngaatctnccncccctccactaagctcagaacaaaaaacttcgacaccactcanttgtcacctgnctgctcaagtaaagtgtaccccatncccaatgtntgctngangctctgncctgcnttangttcggtcctgggaagacctatcaattnaagctatgtttctgactgcctcttgctccctgnaacaancnacccnncnntccaagggggggncggcccccaatccccccaaccntnaattnantttanccccncccccnggcccggccttttacnancntcnnnnacngggnaaaaccnnngctttncccaacnnaatccncct

SEQ ID NO: 20 - DNA, 754 bp, Homo sapien
  misc_feature (1)...(754): n = A,T,C or G
tttttttttttttttttttttaaaaaccccctccattnaatgnaaacttccgaaattgtccaaccccctcntccaaatnnccntttccgggngggggttccaaacccaanttanntttggannttaaattaaatnttnnttggnggnnnaanccnaatgtnangaaagttnaacccantatnancttnaatncctggaaaccngtngnttccaaaaatntttaacccttaantccctccgaaatngttnanggaaaacccaanttctcntaaggttgtttgaaggntnaatnaaaancccnnccaattgtttttngccacgcctgaattaattggnttccgntgttttccnttaaaanaaggnnanccccggttantnaatccccccnnccccaattataccgantttttttngaattgggancccncgggaattaacggggnnnntccctnttggggggcnggnnccccccccntcgggggttngggncaggncnnaattgtttaagggtccgaaaaatccctccnagaaaaaaanctcccaggntgagnntngggtttnccccccccccanggcccctctcgnanagttggggtttggggggcctgggattttntttcccctnttncctcccccccccccnggganagaggttngngttttgntcnncggccccnccnaaganctttnccganttnanttaaatccntgcctnggcgaagtccnttgnagggntaaanggccccctnncggg

SEQ ID NO: 21 - DNA, 755 bp, Homo sapien
  misc_feature (1)...(755): n = A,T,C or G
atcancccatgaccccnaacnngggaccnctcanccggncnnncnaccnccggccnatcanngtnagnncactncnnttnnatcacnccccnccnactacgcccncnanccnacgcnctanncanatnccactganngcgcgangtnganngagaaanctnataccanagncaccanacnccagctgtccnanaangcctnnnatacnggnnnatccaatntgnancctccnaagtattnnncnncanatgattttcctnanccgattacccntnccccctancccctcccccccaacnacgaaggcnctggnccnaaggnngcgncnccccgctagntccccnncaagtcncncncctaaactcanccnnattacncgcttcntgagtatcactccccgaatctcaccctactcaactcaaaaanatcngatacaaaataatncaagcctgnttatnacactntgactgggtctctattttagnggtccntnaancntcctaatacttccagtctnccttcnccaatttccnaanggctctttcngacagcatnttttggttcccnnttgggttcttanngaattgcccttcntngaacgggctcntcttttccttcggttancctggnttcnnccggccagttattatttcccnttttaaattcntnccntttanttttggcnttcnaaacccccggccttgaaaacggccccctggtaaaaggttgttttganaaaatttttgttttgttcc

SEQ ID NO: 22 - DNA, 849 bp, Homo sapien
  misc_feature (1)...(849): n = A,T,C or G
tttttttttttttttangtgtngtcgtgcaggtagaggcttactacaantgtgaanacgtacgctnggantaangcgacccganttctagganncnccctaaaatcanactgtgaagatnatcctgnnnacggaanggtcaccggnngatnntgctagggtgnccnctcccannncnttncataactcngnggccctgcccaccaccttcggcggcccngngnccgggcccgggtcattngnnttaaccncactnngcnancggtttccnnccccnncngacccnggcgatccggggtnctctgtcttcccctgnagncnanaaantgggccncggncccctttacccctnnacaagccacngccntctanccncngccccccctccantnngggggactgccnanngctccgttnctngnnaccccnnngggtncctcggttgtcgantcnaccgnangccanggattccnaaggaaggtgcgttnttggcccctacccttcgctncggnncacccttcccgacnanganccgctcccgcncnncgnngcctcncctcgcaacacccgcnctcntcngtncggnnncccccccacccgcnccctcncncngncgnancnctccnccnccgtctcanncaccaccccgccccgccaggccntcanccacnggnngacnngnagcncnntcgcnccgcgcngcgncnccctcgccncngaactncntcnggccantnncgctcaanccnnacnaaacgccgctgcgcggcccgnagcgnccncctccncgagtcctcccgncttccnacccangnnttccncgaggacacnnnaccccgccnncangcgg

SEQ ID NO: 23 - DNA, 872 bp, Homo sapien
  misc_feature (1)...(872): n = A,T,C or G
gcgcaaactatacttcgctcgnactcgtgcgcctcgctnctcttttcctccgcaaccatgtctgacnancccgattnggcngatatcnanaagntcgancagtccaaactgantaacacacacacncnanaganaaatccnctgccttccanagtanacnattgaacnngagaaccangcnggcgaatcgtaatnaggcgtgcgccgccaatntgtcnccgtttattntnccagcntcncctnccnaccctacntcttcnnagctgtcnnacccctngtncgnaccccccnaggtcgggatcgggtttnnnntgaccgngcnncccctccccccntccatnacganccncccgcaccaccnanngcncgcnccccgnnctcttcgccnccctgtcctntncccctgtngcctggcncngnaccgcattgaccctcgccnnctncnngaaancgnanacgtccgggttgnnannancgctgtgggnnngcgtctgcnccgcgttccttccnncnncttccaccatcttcnttacngggtctccncgccntctcnnncacnccctgggacgctntcctntgccccccttnactcccccccttcgncgtgncccgnccccaccntcatttncanacgntcttcacaannncctggntnnctcccnancngncngtcanccnagggaagggnggggnnccnntgnttgacgttgnggngangtccgaanantcctcnccntcancnctacccctcgggcgnnctctcngttnccaacttancaantctcccccgngngcncntctcagcctcncccnccccnctctctgcantgtnctctgctctnaccnntacgantnttcgncnccctctttcc

SEQ ID NO: 24 - DNA, 815 bp, Homo sapien
  misc_feature (1)...(815): n = A,T,C or G
gcatgcaagcttgagtattctatagngtcacctaaatancttggcntaatcatggtcntanctgncttcctgtgtcaaatgtatacnaantanatatgaatctnatntgacaaganngtatcntncattagtaacaantgtnntgtccatcctgtcngancanattcccatnnattncgncgcattcncngcncantatntaatngggaantcnnntnnnncaccnncatctatcntnccgcnccctgactggnagagatggatnanttctnntntgaccnacatgttcatcttggattnaananccccccgcngnccaccggttngnngcnagccnntcccaagacctcctgtggaggtaacctgcgtcaganncatcaaacntgggaaacccgcnnccangtnnaagtngnnncanangatcccgtccaggnttnaccatcccttcncagcgccccctttngtgccttanagngnagcgtgtccnanccnctcaacatganacgcgccagnccanccgcaattnggcacaatgtcgncgaaccccctagggggantnatncaaanccccaggattgtccncncangaaatcccncanccccnccctacccnnctttgggacngtgaccaantcccggagtnccagtccggccngnctcccccaccggtnnccntgggggggtgaanctcngnntcanccngncgaggnntcgnaaggaaccggncctnggncgaanngancnntcngaagngccncntcgtataaccccccctcnccanccnacngntagntcccccccngggtncggaangg

SEQ ID NO: 25 - DNA, 775 bp, Homo sapien
  misc_feature (1)...(775): n = A,T,C or G
ccgagatgtctcgctccgtggccttagctgtgctcgcgctactctctctttctggcctggaggctatccagcgtactccaaagattcaggtttactcacgtcatccagcagagaatggaaagtcaaatttcctgaattgctatgtgtctgggtttcatccatccgacattgaanttgacttactgaagaatgganagagaattgaaaaagtggagcattcagacttgtctttcagcaaggactggtctttctatctcntgtactacactgaattcacccccactgaaaaagatgagtatgcctgccgtgtgaaccatgtgactttgtcacagcccaagatagttaagtgggatcgagacatgtaagcagncnncatggaagtttgaagatgccgcatttggattggatgaattccaaattctgcttgcttgcnttttaatantgatatgcntatacaccctaccctttatgnccccaaattgtaggggttacatnantgttcncntnggacatgatcttcctttataantccnccnttcgaattgcccgtcncccngttnngaatgtttccnnaaccacggttggctcccccaggtcncctcttacggaagggcctgggccnctttncaaggttgggggaaccnaaaatttcncttntgcccncccnccacnntcttgngnncncantttggaacccttccnattccccttggcctcnnanccttnnctaanaaaacttnaaancgtngcnaaanntttnacttccccccttacc

SEQ ID NO: 26 - DNA, 820 bp, Homo sapien
  misc_feature (1)...(820): n = A,T,C or G
anattantacagtgtaatcttttcccagaggtgtgtanagggaacggggcctagaggcatcccanagatancttatancaacagtgctttgaccaagagctgctgggcacatttcctgcagaaaaggtggcggtccccatcactcctcctctcccatagccatcccagaggggtgagtagccatcangccttcggtgggagggagtcanggaaacaacanaccacagagcanacagaccantgatgaccatgggcgggagcgagcctcttccctgnaccggggtggcananganagcctanctgaggggtcacactataaacgttaacgaccnagatnancacctgcttcaagtgcacccttcctacctgacnaccagngaccnnnaactgcngcctggggacagcnctgggancagctaacnnagcactcacctgcccccccatggccgtncgcntccctggtcctgncaagggaagctccctgttggaattncgggganaccaaggganccccctcctccanctgtgaaggaaaaanngatggaattttncccttccggccnntcccctcttcctttacacgccccctnntactcntctccctctnttntcctgncncacttttnaccccnnnatttcccttnattgatcggannctnganattccactnncgcctnccntcnatcngnaanacnaaanactntctnacccnggggatgggnncctcgntcatcctctctttttcnctaccnccnnttctttgcctctccttngatcatccaaccntcgntggccntncccccccnnntcctttnccc

SEQ ID NO: 27 - DNA, 818 bp, Homo sapien
  misc_feature (1)...(818): n = A,T,C or G
tctgggtgatggcctcttcctcctcagggacctctgactgctctgggccaaagaatctcttgtttcttctccgagccccaggcagcggtgattcagccctgcccaacctgattctgatgactgcggatgctgtgacggacccaaggggcaaatagggtcccagggtccagggaggggcgcctgctgagcacttccgcccctcaccctgcccagcccctgccatgagctctgggctgggtctccgcctccagggttctgctcttccangcangccancaagtggcgctgggccacactggcttcttcctgccccntccctggctctgantctctgtcttcctgtcctgtgcangcnccttggatctcagtttccctcnctcanngaactctgtttctganntcttcanttaactntgantttatnaccnantggnctgtnctgtcnnactttaatgggccngaccggctaatccctccctcnctcccttccanttcnnnnaaccngcttnccntcntctccccntancccgccngggaancctcctttgccctnaccangggccnnnaccgcccntnnctnggggggcnnggtnnctncncctgntnnccccnctcncnnttncctcgtcccnncnncgcnnngcannttcncngtcccnntnnctcttcnngtntcgnaangntcncntntnnnnngncnngntnntncntccctctcnccnnntgnangtnnttnnnncncngnnccccnnnncnnnnnnggnnntnnntctncncngccccnncccccngnattaaggcctccnntctccggccnc

SEQ ID NO: 28 - DNA, 731 bp, Homo sapien
  misc_feature (1)...(731): n = A,T,C or G
aggaagggcggagggatattgtangggattgagggataggagnataangggggaggtgtgtcccaacatganggtgnngttctcttttgaangagggttgngtttttannccnggtgggtgattnaaccccattgtatggagnnaaaggntttnagggatttttcggctcttatcagtatntanattcctgtnaatcggaaaatnatntttcnncnggaaaatnttgctcccatccgnaaattnctcccgggtagtgcatnttngggggncngccangtttcccaggctgctanaatcgtactaaagnttnaagtgggantncaaatgaaaacctnncacagagnatccntacccgactgtnnnttnccttcgccctntgactctgcnngagcccaatacccnngngnatgtcncccngnnnngcgncnctgaaannnnctcgnggctnngancatcanggggtttcgcatcaaaagcnncgtttcncatnaaggcactttngcctcatccaaccnctngccctcnnccatttngccgtcnggttcncctacgctnntngcncctnnntnganattttncccgcctngggnaancctcctgnaatgggtagggncttntcttttnaccnngnggtntactaatcnnctncacgcntnctttctcnaccccccccctttttcaatcccancggcnaatggggtctccccnncganggggggnnncccanncc

SEQ ID NO: 29 - DNA, 822 bp, Homo sapien
  misc_feature (1)...(822): n = A,T,C or G
actagtccagtgtggtggaattccattgtgttggggncncttctatgantantnttagatcgctcanacctcacancctcccnacnangcctataangaanannaataganctgtncnntatntntacnctcatanncctcnnnacccactccctcttaacccntactgtgcctatngcntnnctantctntgccgcctncnanccaccngtgggccnaccncnngnattctcnatctcctcnccatntngcctanantangtncataccctatacctacnccaatgctannnctaancntccatnanttannntaactaccactgacntngactttcncatnanctcctaatttgaatctactctgactcccacngcctannnattagcancntcccccnacnatntctcaaccaaatcntcaacaacctatctanctgttcnccaaccnttncctccgatccccnnacaacccccctcccaaatacccnccacctgacncctaacccncaccatcccggcaagccnanggncatttanccactggaatcacnatngganaaaaaaaacccnaactctctancncnnatctccctaanaaatnctcctnnaatttactnncantnccatcaancccacntgaaacnnaacccctgtttttanatcccttctttcgaaaaccnaccctttannncccaacctttngggcccccccnctncccnaatgaaggncncccaatcnangaaacgnccntgaaaaancnaggcnaanannntccgcanatcctatcccttanttnggggncccttncccngggcccc

SEQ ID NO: 30 - DNA, 787 bp, Homo sapien
  misc_feature (1)...(787): n = A,T,C or G
cggccgcctgctctggcacatgcctcctgaatggcatcaaaagtgatggactgcccattgctagagaagaccttctctcctactgtcattatggagccctgcagactgagggctccccttgtctgcaggatttgatgtctgaagtcgtggagtgtggcttggagctcctcatctacatnagctggaagccctggagggcctctctcgccagcctcccccttctctccacgctctccanggacaccaggggctccaggcagcccattattcccagnangacatggtgtttctccacgcggacccatggggcctgnaaggccagggtctcctttgacaccatctctcccgtcctgcctggcaggccgtgggatccactanttctanaacggncgccaccncggtgggagctccagcttttgttcccnttaatgaaggttaattgcncgcttggcgtaatcatnggtcanaactntttcctgtgtgaaattgtttntcccctcncnattccncncnacatacnaacccggaancataaagtgttaaagcctgggggtngcctnnngaatnaactnaactcaattaattgcgttggctcatggcccgctttccnttcnggaaaactgtcntcccctgcnttnntgaatcggccaccccccngggaaaagcggtttgcnttttngggggntccttccncttcccccctcnctaanccctncgcctcggtcgttncnggtngcggggaangggnatnnnctcccncnaagggggngagnnngntatccccaaa

SEQ ID NO: 31 - DNA, 799 bp, Homo sapien
  misc_feature (1)...(799): n = A,T,C or G
tttttttttttttttttggcgatgctactgtttaattgcaggaggtgggggtgtgtgtaccatgtaccagggctattagaagcaagaaggaaggagggagggcagagcgccctgctgagcaacaaaggactcctgcagccttctctgtctgtctcttggcgcaggcacatggggaggcctcccgcagggtgggggccaccagtccaggggtgggagcactacanggggtgggagtgggtggtggctggtncnaatggcctgncacanatccctacgattcttgacacctggatttcaccaggggaccttctgttctcccanggnaacttcntnnatctcnaaagaacacaactgtttcttcngcanttctggctgttcatggaaagcacaggtgtccnatttnggctgggacttggtacatatggttccggcccacctctcccntcnaanaagtaattcacccccccccnccntctnttgcctgggcccttaantacccacaccggaactcanttanttattcatcttnggntgggcttgntnatcnccncctgaangcgccaagttgaaaggccacgccgtncccnctccccatagnannttttnncntcanctaatgcccccccnggcaacnatccaatccccccccntgggggccccagcccanggcccccgnctcgggnnnccngncncgnantccccaggntctcccantcngncccnnngcncccccgcacgcagaacanaaggntngagccnccgcannnnnnnggtnncnacctcgccccccccnncgnng

SEQ ID NO: 32 - DNA, 789 bp, Homo sapien
  misc_feature (1)...(789): n = A,T,C or G
ttttttttttttttttttttttttttttttttttttttttttttttttttttttttttttttttnccnagggcaggtttattgacaacctcncgggacacaancaggctggggacaggacggcaacaggctccggcggcggcggcggcggccctacctgcggtaccaaatntgcagcctccgctcccgcttgatnttcctctgcagctgcaggatgccntaaaacagggcctcggccntnggtgggcaccctgggatttnaatttccacgggcacaatgcggtcgcancccctcaccaccnattaggaatagtggtnttacccnccnccgttggcncactccccntggaaaccacttntcgcggctccggcatctggtcttaaaccttgcaaacnctggggccctctttttggttantntnccngccacaatcatnactcagactggcncgggctggccccaaaaaancnccccaaaaccggnccatgtcttnncggggttgctgcnatntncatcacctcccgggcncancaggncaacccaaaagttcttgnggcccncaaaaaanctccggggggncccagtttcaacaaagtcatcccccttggcccccaaatcctccccccgnttnctgggtttgggaacccacgcctctnnctttggnnggcaagntggntcccccttcgggcccccggtgggcccnnctctaangaaaacnccntcctnnncaccatccccccnngnnacgnctancaangnatccctttttttanaaacgggccccccncg

SEQ ID NO: 33 - DNA, 793 bp, Homo sapien
  misc_feature (1)...(793): n = A,T,C or G
gacagaacatgttggatggtggagcacctttctatacgacttacaggacagcagatggggaattcatggctgttggagcaatanaaccccagttctacgagctgctgatcaaaggacttggactaaagtctgatgaacttcccaatcagatgagcatggatgattggccagaaatgaanaagaagtttgcagatgtatttgcaaagaagacgaaggcagagtggtgtcaaatctttgacggcacagatgcctgtgtgactccggttctgacttttgaggaggttgttcatcatgatcacaacaangaacggggctcgtttatcaccantgaggagcaggacgtgagcccccgccctgcacctctgctgttaaacaccccagccatcccttctttcaaaagggatccactacttctagagcggncgccaccgcggtggagctccagcttttgttccctttagtgagggttaattgcgcgcttggcgtaatcatggtcatanctgtttcctgtgtgaaattgttatccgctcacaattccacacaacatacganccggaagcatnaaattttaaagcctggnggtngcctaatgantgaactnactcacattaattggctttgcgctcactgcccgctttccagtccggaaaacctgtccttgccagctgccnttaatgaatcnggccaccccccggggaaaaggcngtttgcttnttggggcgcncttcccgctttctcgcttcctgaantccttccccccggtctttcggcttgcggcnaacggtatcnacct

SEQ ID NO: 34 - DNA, 756 bp, Homo sapien
  misc_feature (1)...(756): n = A,T,C or G
gccgcgaccggcatgtacgagcaactcaagggcgagtggaaccgtaaaagccccaatcttancaagtgcggggaanagctgggtcgactcaagctagttcttctggagctcaacttcttgccaaccacagggaccaagctgaccaaacagcagctaattctggcccgtgacatactggagatcggggcccaatggagcatcctacgcaangacatcccctccttcgagcgctacatggcccagctcaaatgctactactttgattacaangagcagctccccgagtcagcctatatgcaccagctcttgggcctcaacctcctcttcctgctgtcccagaaccgggtggctgantnccacacgganttggancggctgcctgcccaangacatacanaccaatgtctacatcnaccaccagtgtcctggagcaatactgatgganggcagctaccncaaagtnttcctggccnagggtaacatcccccgccgagagctacaccttcttcattgacatcctgctcgacactatcagggatgaaaatcgcngggttgctccagaaaggctncaanaanatccttttcnctgaaggcccccggatncnctagtnctagaatcggcccgccatcgcggtggancctccaacctttcgttnccctttactgagggttnattgccgcccttggcgttatcatggtcacnccngttncctgtgttgaaattnttaaccccccacaattccacgccnacattng

SEQ ID NO: 35 - DNA, 834 bp, Homo sapien
  misc_feature (1)...(834): n = A,T,C or G
ggggatctctanatcnacctgnatgcatggttgtcggtgtggtcgctgtcgatgaanatgaacaggatcttgcccttgaagctctcggctgctgtntttaagttgctcagtctgccgtcatagtcagacacnctcttgggcaaaaaacancaggatntgagtcttgatttcacctccaataatcttcngggctgtctgctcggtgaactcgatgacnangggcagctggttgtgtntgataaantccancangttctccttggtgacctccccttcaaagttgttccggccttcatcaaacttctnnaanangannancccanctttgtcgagctggnatttgganaacacgtcactgttggaaactgatcccaaatggtatgtcatccatcgcctctgctgcctgcaaaaaacttgcttggcncaaatccgactccccntccttgaaagaagccnatcacacccccctccctggactccnncaangactctnccgctnccccntccnngcagggttggtggcannccgggcccntgcgcttcttcagccagttcacnatnttcatcagcccctctgccagctgttntattccttgggggggaanccgtctctcccttcctgaannaactttgaccgtnggaatagccgcgcntcnccntacntnctgggccgggttcaaantccctccnttgncnntcncctcgggccattctggatttnccnaactttttccttcccccnccccncggngtttggntttttcatngggccccaactctgctnttggccantcccctgggggcntntancnccccctntggtcccntngggcc

SEQ ID NO: 36 - DNA, 814 bp, Homo sapien
  misc_feature (1)...(814): n = A,T,C or G
cggncgctttccngccgcgccccgtttccatgacnaaggctcccttcangttaaatacnncctagnaaacattaatgggttgctctactaatacatcatacnaaccagtaagcctgcccanaacgccaactcaggccattcctaccaaaggaagaaaggctggtctctccaccccctgtaggaaaggcctgccttgtaagacaccacaatncggctgaatctnaagtcttgtgttttactaatggaaaaaaaaaataaacaanaggttttgttctcatggctgcccaccgcagcctggcactaaaacancccagcgctcacttctgcttgganaaatattctttgctcttttggacatcaggcttgatggtatcactgccacntttccacccagctgggcncccttcccccatntttgtcantganctggaaggcctgaancttagtctccaaaagtctcngcccacaagaccggccaccaggggangtcntttncagtggatctgccaaanantacccntatcatcnntgaataaaaaggcccctgaacganatgcttccancancctttaagacccataatcctngaaccatggtgcccttccggtctgatccnaaaggaatgttcctgggtcccantccctcctttgttncttacgttgtnttggacccntgctngnatnacccaantganatccccngaagcaccctncccctggcatttgantttcntaaattctctgccctacnnctgaaagcacnattccctnggcnccnaanggngaactcaagaaggtctnngaaaaaccacncn

SEQ ID NO: 37 - DNA, 760 bp, Homo sapien
  misc_feature (1)...(760): n = A,T,C or G
gcatgctgctcttcctcaaagttgttcttgttgccataacaaccaccataggtaaagcgggcgcagtgttcgctgaaggggttgtagtaccagcgcgggatgctctccttgcagagtcctgtgtctggcaggtccacgcaatgccctttgtcactggggaaatggatgcgctggagctcgtcnaanccactcgtgtatttttcacangcagcctcctccgaagcntccgggcagttgggggtgtcgtcacactccactaaactgtcgatncancagcccattgctgcagcggaactgggtgggctgacaggtgccagaacacactggatnggcctttccatggaagggcctgggggaaatcncctnancccaaactgcctctcaaaggccaccttgcacaccccgacaggctagaaatgcactcttcttcccaaaggtagttgttcttgttgcccaagcancctccancaaaccaaaancttgcaaaatctgctccgtgggggtcatnnntaccanggttggggaaanaaacccggcngnganccnccttgtttgaatgcnaaggnaataatcctcctgtcttgcttgggtggaanagcacaattgaactgttaacnttgggccgngttccnctngggtggtctgaaactaatcaccgtcactggaaaaaggtangtgccttccttgaattcccaaanttcccctngntttgggtnntttctcctctnccctaaaaatcgtnttccccccccntanggcg

SEQ ID NO: 38 - DNA, 724 bp, Homo sapien
  misc_feature (1)...(724): n = A,T,C or G
tttttttttttttttttttttttttttttttttttaaaaaccccctccattgaatgaaaacttccnaaattgtccaaccccctcnnccaaatnnccatttccgggggggggttccaaacccaaattaattttggantttaaattaaatnttnattnggggaanaanccaaatgtnaagaaaatttaacccattatnaacttaaatncctngaaacccntggnttccaaaaatttttaacccttaaatccctccgaaattgntaanggaaaaccaaattcncctaaggctntttgaaggttngatttaaacccccttnanttnttttnacccnngnctnaantatttngnttccggtgttttcctnttaancntnggtaactcccgntaatgaannnccctaanccaattaaaccgaattttttttgaattggaaattccnngggaattnaccggggtttttcccntttgggggccatncccccnctttcggggtttgggnntaggttgaatttttnnangncccaaaaaancccccaanaaaaaaactcccaagnnttaattngaatntcccccttcccaggccttttgggaaaggngggtttntgggggccnggganttcnttcccccnttnccnccccccccccnggtaaanggttatngnntttggtttttgggccccttnanggaccttccggatngaaattaaatccccgggncggccg

SEQ ID NO: 39 - DNA, 751 bp, Homo sapien
  misc_feature (1)...(751): n = A,T,C or G
tttttttttttttttctttgctcacatttaatttttattttgattttttttaatgctgcacaacacaatatttatttcatttgtttcttttatttcattttatttgtttgctgctgctgttttatttatttttactgaaagtgagagggaacttttgtggccttttttcctttttctgtaggccgccttaagctttctaaatttggaacatctaagcaagctgaanggaaaagggggtttcgcaaaatcactcgggggaanggaaaggttgctttgttaatcatgccctatggtgggtgattaactgcttgtacaattacntttcacttttaattaattgtgctnaangctttaattanacttgggggttccctccccanaccaaccccnctgacaaaaagtgccngccctcaaatnatgtcccggcnntcnttgaaacacacngcngaangttctcattntccccncnccaggtnaaaatgaagggttaccatntttaacnccacctccacntggcnnngcctgaatcctcnaaaancnccctcaancnaattnctnngccccggtcncgcntnngtcccncccgggctccgggaantncacccccngaanncnntnncnaacnaaattccgaaaatattcccnntcnctcaattcccccnnagactntcctcnncnancncaattttcttttnntcacgaacncgnnccnnaaaatgnnnnncncctccnctngtccnnaatcnccanc

SEQ ID NO: 40 - DNA, 753 bp, Homo sapien
  misc_feature (1)...(753): n = A,T,C or G
gtggtattttctgtaagatcaggtgttcctccctcgtaggtttagaggaaacaccctcatagatgaaaacccccccgagacagcagcactgcaactgccaagcagccggggtaggaggggcgccctatgcacagctgggcccttgagacagcagggcttcgatgtcaggctcgatgtcaatggtctggaagcggcggctgtacctgcgtaggggcacaccgtcagggcccaccaggaacttctcaaagttccaggcaacntcgttgcgacacaccggagaccaggtgatnagcttggggtcggtcataancgcggtggcgtcgtcgctgggagctggcagggcctcccgcaggaaggcnaataaaaggtgcgcccccgcaccgttcanctcgcacttctcnaanaccatgangttgggctcnaacccaccaccannccggacttccttganggaattcccaaatctcttcgntcttgggcttctnctgatgccctanctggttgcccngnatgccaancanccccaanccccggggtcctaaancacccncctcctcntttcatctgggttnttntccccggaccntggttcctctcaagggancccatatctcnaccantactcaccntncccccccntgnnacccanccttctanngnttcccncccgncctctggcccntcaaanangcttncacnacctgggtctgccttcccccctnccctatctgnaccccncntttgtctcantnt

SEQ ID NO: 41 - DNA, 341 bp, Homo sapien
actatatccatcacaacagacatgcttcatcccatagacttcttgacatagcttcaaatgagtgaacccatccttgatttatatacatatatgttctcagtattttgggagcctttccacttctttaaaccttgttcattatgaacactgaaaataggaatttgtgaagagttaaaaagttatagcttgtttacgtagtaagtttttgaagtctacattcaatccagacacttagttgagtgttaaactgtgatttttaaaaaatatcatttgagaatattctttcagaggtattttcatttttactttttgattaattgtgttttatatattagggtagt

SEQ ID NO: 42 - DNA, 101 bp, Homo sapien
acttactgaatttagttctgtgctcttccttatttagtgttgtatcataaatactttgatgtttcaaacattctaaataaataattttcagtggcttcata

SEQ ID NO: 43 - DNA, 305 bp, Homo sapien
acatctttgttacagtctaagatgtgttcttaaatcaccattccttcctggtcctcaccctccagggtggtctcacactgtaattagagctattgaggagtctttacagcaaattaagattcagatgccttgctaagtctagagttctagagttatgtttcagaaagtctaagaaacccacctcttgagaggtcagtaaagaggacttaatatttcatatctacaaaatgaccacaggattggatacagaacgagagttatcctggataactcagagctgagtacctgcccgggggccgctcgaa

SEQ ID NO: 44 - DNA, 852 bp, Homo sapien
  misc_feature (1)...(852): n = A,T,C or G
acataaatatcagagaaaagtagtctttgaaatatttacgtccaggagttctttgtttctgattatttggtgtgtgttttggtttgtgtccaaagtattggcagcttcagttttcattttctctccatcctcgggcattcttcccaaatttatataccagtcttcgtccatccacacgctccagaatttctcttttgtagtaatatctcatagctcggctgagcttttcataggtcatgctgctgttgttcttctttttaccccatagctgagccactgcctctgatttcaagaacctgaagacgccctcagatcggtcttcccattttattaatcctgggttcttgtctgggttcaagaggatgtcgcggatgaattcccataagtgagtccctctcgggttgtgctttttggtgtggcacttggcaggggggtcttgctcctttttcatatcaggtgactctgcaacaggaaggtgactggtggttgtcatggagatctgagcccggcagaaagttttgctgtccaacaaatctactgtgctaccatagttggtgtcatataaatagttctngtctttccaggtgttcatgatggaaggctcagtttgttcagtcttgacaatgacattgtgtgtggactggaacaggtcactactgcactggccgttccacttcagatgctgcaagttgctgtagaggagntgccccgccgtccctgccgcccgggtgaactcctgcaaactcatgctgcaaaggtgctcgccgttgatgtcgaactcntggaaagggatacaattggcatccagctggttggtgtccaggaggtgatggagccactcccacacctggt

SEQ ID NO: 45 - DNA, 234 bp, Homo sapien
acaacagacccttgctcgctaacgacctcatgctcatcaagttggacgaatccgtgtccgagtctgacaccatccggagcatcagcattgcttcgcagtgccctaccgcggggaactcttgcctcgtttctggctggggtctgctggcgaacggcagaatgcctaccgtgctgcagtgcgtgaacgtgtcggtggtgtctgaggaggtctgcagtaagctctatgacccgctgt

SEQ ID NO: 46 - DNA, 590 bp, Homo sapien
  misc_feature (1)...(590): n = A,T,C or G
actttttatttaaatgtttataaggcagatctatgagaatgatagaaaacatggtgtgtaatttgatagcaatattttggagattacagagttttagtaattaccaattacacagttaaaaagaagataatatattccaagcanatacaaaatatctaatgaaagatcaaggcaggaaaatgantataactaattgacaatggaaaatcaattttaatgtgaattgcacattatcctttaaaagctttcaaaanaaanaattattgcagtctanttaattcaaacagtgttaaatggtatcaggataaanaactgaagggcanaaagaattaattttcacttcatgtaacncacccanatttacaatggcttaaatgcanggaaaaagcagtggaagtagggaagtantcaaggtctttctggtctctaatctgccttactctttgggtgtggctttgatcctctggagacagctgccagggctcctgttatatccacaatcccagcagcaagatgaagggatgaaaaaggacacatgctgccttcctttgaggagacttcatctcactggccaacactcagtcacatgt

SEQ ID NO: 47 - DNA, 774 bp, Homo sapien
  misc_feature (1)...(774): n = A,T,C or G
acaagggggcataatgaaggagtgggganagattttaaagaaggaaaaaaaacgaggccctgaacagaattttcctgnacaacggggcttcaaaataattttcttggggaggttcaagacgcttcactgcttgaaacttaaatggatgtgggacanaattttctgtaatgaccctgagggcattacagacgggactctgggaggaaggataaacagaaaggggacaaaggctaatcccaaaacatcaaagaaaggaaggtggcgtcatacctcccagcctacacagttctccagggctctcctcatccctggaggacgacagtggaggaacaactgaccatgtccccaggctcctgtgtgctggctcctggtcttcagcccccagctctggaagcccaccctctgctgatcctgcgtggcccacactccttgaacacacatccccaggttatattcctggacatggctgaacctcctattcctacttccgagatgccttgctccctgcagcctgtcaaaatcccactcaccctccaaaccacggcatgggaagcctttctgacttgcctgattactccagcatcttggaacaatccctgattccccactccttagaggcaagatagggtggttaagagtagggctggaccacttggagccaggctgctggcttcaaattntggctcatttacgagctatgggaccttgggcaagtnatcttcacttctatgggcntcattttgttctacctgcaaaatgggggataataatagt

SEQ ID NO: 48 - DNA, 124 bp, Homo sapien
  misc_feature (1)...(124): n = A,T,C or G
canaaattgaaattttataaaaaggcatttttctcttatatccataaaatgatataatttttgcaantatanaaatgtgtcataaattataatgttccttaattacagctcaacgcaacttggt

SEQ ID NO: 49 - DNA, 147 bp, Homo sapien
  misc_feature (1)...(147): n = A,T,C or G
gccgatgctactattttattgcaggaggtgggggtgtttttattattctctcaacagctttgtggctacaggtggtgtctgactgcatnaaaaanttttttacgggtgattgcaaaaattttagggcacccatatcccaagcantgt

SEQ ID NO: 50 - DNA, 107 bp, Homo sapien
acattaaattaataaaaggactgttggggttctgctaaaacacatggcttgatatattgcatggtttgaggttaggaggagttaggcatatgttttgggagaggggt

SEQ ID NO: 51 - DNA, 204 bp, Homo sapien
gtcctaggaagtctaggggacacacgactctggggtcacggggccgacacacttgcacggcgggaaggaaaggcagagaagtgacaccgtcagggggaaatgacagaaaggaaaatcaaggccttgcaaggtcagaaaggggactcagggcttccaccacagccctgccccacttggccacctcccttttgggaccagcaatgt

SEQ ID NO: 52 - DNA, 491 bp, Homo sapien
  misc_feature (1)...(491): n = A,T,C or G
acaaagataacatttatcttataacaaaaatttgatagttttaaaggttagtattgtgtagggtattttccaaaagactaaagagataactcaggtaaaaagttagaaatgtataaaacaccatcagacaggtttttaaaaaacaacatattacaaaattagacaatcatccttaaaaaaaaaacttcttgtatcaatttcttttgttcaaaatgactgacttaantatttttaaatatttcanaaacacttcctcaaaaattttcaanatggtagctttcanatgtnccctcagtcccaatgttgctcagataaataaatctcgtgagaacttaccacccaccacaagctttctggggcatgcaacagtgtcttttctttnctttttctttttttttttttacaggcacagaaactcatcaattttatttggataacaaagggtctccaaattatattgaaaaataaatccaagttaatatcactcttgt

SEQ ID NO: 53 - DNA, 484 bp, Homo sapien
  misc_feature (1)...(484): n = A,T,C or G
acataatttagcagggctaattaccataagatgctatttattaanaggtntatgatctgagtattaacagttgctgaagtttggtatttttatgcagcattttctttttgctttgataacactacagaacccttaaggacactgaaaattagtaagtaaagttcagaaacattagctgctcaatcaaatctctacataacactatagtaattaaaacgttaaaaaaaagtgttgaaatctgcactagtatanaccgctcctgtcaggataanactgctttggaacagaaagggaaaaancagctttgantttctttgtgctgatangaggaaaggctgaattaccttgttgcctctccctaatgattggcaggtcnggtaaatnccaaaacatattccaactcaacacttcttttccncgtancttgantctgtgtattccaggancaggcggatggaatgggccagcccncggatgttccant

SEQ ID NO: 54 - DNA, 151 bp, Homo sapien
actaaacctcgtgcttgtgaactccatacagaaaacggtgccatccctgaacacggctggccactgggtatactgctgacaaccgcaacaacaaaaacacaaatccttggcactggctagtctatgtcctctcaagtgcctttttgtttgt

SEQ ID NO: 55 - DNA, 91 bp, Homo sapien
acctggcttgtctccgggtggttcccggcgccccccacggtccccagaacggacactttcgccctccagtggatactcgagccaaagtggt

SEQ ID NO: 56 - DNA, 133 bp, Homo sapien
ggcggatgtgcgttggttatatacaaatatgtcattttatgtaagggacttgagtatacttggatttttggtatctgtgggttggggggacggtccaggaaccaataccccatggataccaagggacaactgt

SEQ ID NO: 57 - DNA, 147 bp, Homo sapien
  misc_feature (1)...(147): n = A,T,C or G
actctggagaacctgagccgctgctccgcctctgggatgaggtgatgcangcngtggcgcgactgggagctgagcccttccctttgcgcctgcctcagaggattgttgccgacntgcanatctcantgggctggatncatgcagggt

SEQ ID NO: 58 - DNA, 198 bp, Homo sapien
  misc_feature (1)...(198): n = A,T,C or G
acagggatataggtttnaagttattgtnattgtaaaatacattgaattttctgtatactctgattacatacatttatcctttaaaaaagatgtaaatcttaatttttatgccatctattaatttaccaatgagttaccttgtaaatgagaagtcatgatagcactgaattttaactagttttgacttctaagtttggt

SEQ ID NO: 59 - DNA, 330 bp, Homo sapien
acaacaaatgggttgtgaggaagtcttatcagcaaaactggtgatggctactgaaaagatccattgaaaattatcattaatgattttaaatgacaagttatcaaaaactcactcaattttcacctgtgctagcttgctaaaatgggagttaactctagagcaaatatagtatcttctgaatacagtcaataaatgacaaagccagggcctacaggtggtttccagactttccagacccagcagaaggaatctattttatcacatggatctccgtctgtgctcaaaatacctaatgatatttttcgtctttattggacttctttgaagagt

SEQ ID NO: 60 - DNA, 175 bp, Homo sapien
accgtgggtgccttctacattcctgacggctccttcaccaacatctggttctacttcggcgtcgtgggctccttcctcttcatcctcatccagctggtgctgctcatcgactttgcgcactcctggaaccagcggtggctgggcaaggccgaggagtgcgattcccgtgcctggt

SEQ ID NO: 61 - DNA, 154 bp, Homo sapien
accccacttttcctcctgtgagcagtctggacttctcactgctacatgatgagggtgagtggttgttgctcttcaacagtatcctcccctttccggatctgctgagccggacagcagtgctggactgcacagccccggggctccacattgctgt

SEQ ID NO: 62 - DNA, 30 bp, Homo sapien
cgctcgagccctatagtgagtcgtattaga

SEQ ID NO: 63 - DNA, 89 bp, Homo sapien
acaagtcatttcagcaccctttgctcttcaaaactgaccatcttttatatttaatgcttcctgtatgaataaaaatggttatgtcaagt

SEQ ID NO: 64 - DNA, 97 bp, Homo sapien
accggagtaactgagtcgggacgctgaatctgaatccaccaataaataaaggttctgcagaatcagtgcatccaggattggtccttggatctggggt

SEQ ID NO: 65 - DNA, 377 bp, Homo sapien
  misc_feature (1)...(377): n = A,T,C or G
acaacaanaantcccttctttaggccactgatggaaacctggaacccccttttgatggcagcatggcgtcctaggccttgacacagcggctggggtttgggctntcccaaaccgcacaccccaaccctggtctacccacanttctggctatgggctgtctctgccactgaacatcagggttcggtcataanatgaaatcccaanggggacagaggtcagtagaggaagctcaatgagaaaggtgctgtttgctcagccagaaaacagctgcctggcattcgccgctgaactatgaacccgtgggggtgaactacccccangaggaatcatgcctgggcgatgcaanggtgccaacaggaggggcgggaggagcatgt

SEQ ID NO: 66 - DNA, 305 bp, Homo sapien
acgcctttccctcagaattcagggaagagactgtcgcctgccttcctccgttgttgcgtgagaacccgtgtgccccttcccaccatatccaccctcgctccatctttgaactcaaacacgaggaactaactgcaccctggtcctctccccagtccccagttcaccctccatccctcaccttcctccactctaagggatatcaacactgcccagcacaggggccctgaatttatgtggtttttatatattttttaataagatgcactttatgtcattttttaataaagtctgaagaattactgttt

SEQ ID NO: 67 - DNA, 385 bp, Homo sapien
actacacacactccacttgcccttgtgagacactttgtcccagcactttaggaatgctgaggtcggaccagccacatctcatgtgcaagattgcccagcagacatcaggtctgagagttccccttttaaaaaaggggacttgcttaaaaaagaagtctagccacgattgtgtagagcagctgtgctgtgctggagattcacttttgagagagttctcctctgagacctgatctttagaggctgggcagtcttgcacatgagatggggctggtctgatctcagcactccttagtctgcttgcctctcccagggccccagcctggccacacctgcttacagggcactctcagatgcccataccatagtttctgtgctagtggaccgt

SEQ ID NO: 68 - DNA, 73 bp, Homo sapien
acttaaccagatatatttttaccccagatggggatattctttgtaaaaaatgaaaataaagtttttttaatgg

SEQ ID NO: 69 - DNA, 536 bp, Homo sapien
  misc_feature (1)...(536): n = A,T,C or G
actagtccagtgtggtggaattccattgtgttgggggctctcaccctcctctcctgcagctccagctttgtgctctgcctctgaggagaccatggcccagcatctgagtaccctgctgctcctgctggccaccctagctgtggccctggcctggagccccaaggaggaggataggataatcccgggtggcatctataacgcagacctcaatgatgagtgggtacagcgtgcccttcacttcgccatcagcgagtataacaaggccaccaaagatgactactacagacgtccgctgcgggtactaagagccaggcaacagaccgttgggggggtgaattacttcttcgacgtagaggtgggccgaaccatatgtaccaagtcccagcccaacttggacacctgtgccttccatgaacagccagaactgcagaagaaacagttgtgctctttcgagatctacgaagttccctggggagaacagaangtccctgggtgaaatccaggtgtcaagaaatcctanggatctgttgccaggc

SEQ ID NO: 70 - DNA, 477 bp, Homo sapien
atgacccctaacaggggccctctcagccctcctaatgacctccggcctagccatgtgatttcacttccactccataacgctcctcatactaggcctactaaccaacacactaaccatataccaatgatggcgcgatgtaacacgagaaagcacataccaaggccaccacacaccacctgtccaaaaaggccttcgatacgggataatcctatttattacctcagaagtttttttcttcgcagggatttttctgagccttttaccactccagcctagcccctaccccccaactaggagggcactggcccccaacaggcatcaccccgctaaatcccctagaagtcccactcctaaacacatccgtattactcgcatcaggagtatcaatcacctgagctcaccatagtctaatagaaaacaaccgaaaccaaattattcaaagcactgcttattacaattttactgggtctctatttt

SEQ ID NO: 71 - DNA, 533 bp, Homo sapien
  misc_feature (1)...(533): n = A,T,C or G
agagctataggtacagtgtgatctcagctttgcaaacacattttctacatagatagtactaggtattaatagatatgtaaagaaagaaatcacaccattaataatggtaagattggtttatgtgattttagtggtatttttggcacccttatatatgttttccaaactttcagcagtgatattatttccataacttaaaaagtgagtttgaaaaagaaaatctccagcaagcatctcatttaaataaaggtttgtcatctttaaaaatacagcaatatgtgactttttaaaaaagctgtcaaataggtgtgaccctactaataattattagaaatacatttaaaaacatcgagtacctcaagtcagtttgccttgaaaaatatcaaatataactcttagagaaatgtacataaaagaatgcttcgtaattttggagtangaggttccctcctcaattttgtatttttaaaaagtacatggtaaaaaaaaaaattcacaacagtatataaggctgtaaaatgaagaattctgcc

SEQ ID NO: 72 - DNA, 511 bp, Homo sapien
  misc_feature (1)...(511): n = A,T,C or G
tattacggaaaaacacaccacataattcaactancaaagaanactgcttcagggcgtgtaaaatgaaaggcttccaggcagttatctgattaaagaacactaaaagagggacaaggctaaaagccgcaggatgtctacactatancaggcgctatttgggttggctggaggagctgtggaaaacatgganagattggtgctgganatcgccgtggctattcctcattgttattacanagtgaggttctctgtgtgcccactggtttgaaaaccgttctncaataatgatagaatagtacacacatgagaactgaaatggcccaaacccagaaagaaagcccaactagatcctcagaanacgcttctagggacaataaccgatgaagaaaagatggcctccttgtgcccccgtctgttatgatttctctccattgcagcnanaaacccgttcttctaagcaaacncaggtgatgatggcnaaaatacaccccctcttgaagnaccnggagga

SEQ ID NO: 73 - DNA, 499 bp, Homo sapien
  misc_feature (1)...(499): n = A,T,C or G
cagtgccagcactggtgccagtaccagtaccaataacagtgccagtgccagtgccagcaccagtggtggcttcagtgctggtgccagcctgaccgccactctcacatttgggctcttcgctggccttggtggagctggtgccagcaccagtggcagctctggtgcctgtggtttctcctacaagtgagattttagatattgttaatcctgccagtctttctcttcaagccagggtgcatcctcagaaacctactcaacacagcactctaggcagccactatcaatcaattgaagttgacactctgcattaaatctatttgccatttctgaaaaaaaaaaaaaaaaaagggcggccgctcgantctagagggcccgtttaaacccgctgatcagcctcgactgtgccttctanttgccagccatctgttgtttgcccctcccccgntgccttccttgaccctggaaagtgccactcccactgtcctttcctaantaaaat

SEQ ID NO: 74 - DNA, 537 bp, Homo sapien
  misc_feature (1)...(537): n = A,T,C or G
tttcataggagaacacactgaggagatacttgaagaatttggattcagccgcgaagagatttatcagcttaactcagataaaatcattgaaagtaataaggtaaaagctagtctctaacttccaggcccacggctcaagtgaatttgaatactgcatttacagtgtagagtaacacataacattgtatgcatggaaacatggaggaacagtattacagtgtcctaccactctaatcaagaaaagaattacagactctgattctacagtgatgattgaattctaaaaatggtaatcattagggcttttgatttataanactttgggtacttatactaaattatggtagttatactgccttccagtttgcttgatatatttgttgatattaagattcttgacttatattttgaatgggttctactgaaaaangaatgatatattcttgaagacatcgatatacatttatttacactcttgattctacaatgtagaaaatgaaggaaatgccccaaattgtatggtgataaaagtcccgt

SEQ ID NO: 75 - DNA, 467 bp, Homo sapien
  misc_feature (1)...(467): n = A,T,C or G
caaanacaattgttcaaaagatgcaaatgatacactactgctgcagctcacaaacacctctgcatattacacgtacctcctcctgctcctcaagtagtgtggtctattttgccatcatcacctgctgtctgcttagaagaacggctttctgctgcaanggagagaaatcataacagacggtggcacaaggaggccatcttttcctcatcggttattgtccctagaagcgtcttctgaggatctagttgggctttctttctgggtttgggccatttcanttctcatgtgtgtactattctatcattattgtataacggttttcaaaccngtgggcacncagagaacctcactctgtaataacaatgaggaatagccacggtgatctccagcaccaaatctctccatgttnttccagagctcctccagccaacccaaatagccgctgctatngtgtagaacatccctgn

SEQ ID NO: 76 - DNA, 400 bp, Homo sapien
  misc_feature (1)...(400): n = A,T,C or G
aagctgacagcattcgggccgagatgtctcgctccgtggccttagctgtgctcgcgctactctctctttctggcctggaggctatccagcgtactccaaagattcaggtttactcacgtcatccagcagagaatggaaagtcaaatttcctgaattgctatgtgtctgggtttcatccatccgacattgaagttgacttactgaagaatggagagagaattgaaaaagtggagcattcagacttgtctttcagcaaggactggtctttctatctcttgtactacactgaattcacccccactgaaaaagatgagtatgcctgccgtgtgaaccatgtgactttgtcacagcccaagatngttnagtgggatcganacatgtaagcagcancatgggaggt

SEQ ID NO: 77 - DNA, 248 bp, Homo sapien
ctggagtgccttggtgtttcaagcccctgcaggaagcagaatgcaccttctgaggcacctccagctgccccggcgggggatgcgaggctcggagcacccttgcccggctgtgattgctgccaggcactgttcatctcagcttttctgtccctttgctcccggcaagcgcttctgctgaaagttcatatctggagcctgatgtcttaacgaataaaggtcccatgctccacccgaaaaaaaaaaaaaaa

SEQ ID NO: 78 - DNA, 201 bp, Homo sapien
actagtccagtgtggtggaattccattgtgttgggcccaacacaatggctacctttaacatcacccagaccccgccctgcccgtgccccacgctgctgctaacgacagtatgatgcttactctgctactcggaaactatttttatgtaattaatgtatgctttcttgtttataaatgcctgatttaaaaaaaaaaaaaaaa

SEQ ID NO: 79 - DNA, 552 bp, Homo sapien
  misc_feature (1)...(552): n = A,T,C or G
tccttttgttaggtttttgagacaaccctagacctaaactgtgtcacagacttctgaatgtttaggcagtgctagtaatttcctcgtaatgattctgttattactttcctattctttattcctctttcttctgaagattaatgaagttgaaaattgaggtggataaatacaaaaaggtagtgtgatagtataagtatctaagtgcagatgaaagtgtgttatatatatccattcaaaattatgcaagttagtaattactcagggttaactaaattactttaatatgctgttgaacctactctgttccttggctagaaaaaattataaacaggactttgttagtttgggaagccaaattgataatattctatgttctaaaagttgggctatacataaantatnaagaaatatggaattttattcccaggaatatggggttcatttatgaatantacccggganagaagttttgantnaaaccngttttggttaatacgttaatatgtcctnaatnaacaaggcntgacttatttccaaaaaaaaaaaaaaaaa

SEQ ID NO: 80 - DNA, 476 bp, Homo sapien
  misc_feature (1)...(476): n = A,T,C or G
acagggatttgagatgctaaggccccagagatcgtttgatccaaccctcttattttcagaggggaaaatggggcctagaagttacagagcatctagctggtgcgctggcacccctggcctcacacagactcccgagtagctgggactacaggcacacagtcactgaagcaggccctgtttgcaattcacgttgccacctccaacttaaacattcttcatatgtgatgtccttagtcactaaggttaaactttcccacccagaaaaggcaacttagataaaatcttagagtactttcatactcttctaagtcctcttccagcctcactttgagtcctccttgggggttgataggaantntctcttggctttctcaataaaatctctatccatctcatgtttaatttggtacgcntaaaaatgctgaaaaaattaaaatgttctggtttcnctttaaaaaaaaaaaaaaaaaaaaaaa

SEQ ID NO: 81 - DNA, 232 bp, Homo sapien
  misc_feature (1)...(232): n = A,T,C or G
tttttttttgtatgccntcnctgtggngttattgttgctgccaccctggaggagcccagtttcttctgtatctttcttttctgggggatcttcctggctctgcccctccattcccagcctctcatccccatcttgcacttttgctagggttggaggcgctttcctggtagcccctcagagactcagtcagcgggaataagtcctaggggtggggggtgtggcaagccggcct

SEQ ID NO: 82 - DNA, 383 bp, Homo sapien
  misc_feature (1)...(383): n = A,T,C or G
aggcgggagcagaagctaaagccaaagcccaagaagagtggcagtgccagcactggtgccagtaccagtaccaataacatgccagtgccagtgccagcaccagtggtggcttcagtgctggtgccagcctgaccgccactctcacatttgggctcttcgctggccttggtggagctggtgccagcaccagtggcagctctggtgcctgtggtttctcctacaagtgagattttagatattgttaatcctgccagtctttctcttcaagccagggtgcatcctcagaaacctactcaacacagcactctnggcagccactatcaatcaattgaagttgacactctgcattaaatctatttgccatttcaaaaaaaaaaaaaaaa

SEQ ID NO: 83 - DNA, 494 bp, Homo sapien
  misc_feature (1)...(494): n = A,T,C or G
accgaattgggaccgctggcttataagcgatcatgtcctccagtattacctcaacgagcagggagatcgagtctatacgctgaagaaatttgacccgatgggacaacagacctgctcagcccatcctgctcggttctccccagatgacaaatactctcgacaccgaatcaccatcaagaaacgcttcaaggtgctcatgacccagcaaccgcgccctgtcctctgagggtccttaaactgatgtcttttctgccacctgttacccctcggagactccgtaaccaaactcttcggactgtgagccctgatgcctttttgccagccatactctttggcntccagtctctcgtggcgattgattatgcttgtgtgaggcaatcatggtggcatcacccatnaagggaacacatttganttttttttcncatattttaaattacnaccagaatanttcagaataaatgaattgaaaaactcttaaaaaaaaaaaaaaa

SEQ ID NO: 84 - DNA, 380 bp, Homo sapien
  misc_feature (1)...(380): n = A,T,C or G
gctggtagcctatggcgtggccacggangggctcctgaggcacgggacagtgacttcccaagtatcctgcgccgcgtcttctaccgtccctacctgcagatcttcgggcagattccccaggaggacatggacgtggccctcatggagcacagcaactgctcgtcggagcccggcttctgggcacaccctcctggggcccaggcgggcacctgcgtctcccagtatgccaactggctggtggtgctgctcctcgtcatcttcctgctcgtggccaacatcctgctggtcacttgctcattgccatgttcagttacacattcggcaaagtacagggcaacagcnatctctactgggaaggccagcgttnccgcctcatccgg

SEQ ID NO: 85 - DNA, 481 bp, Homo sapien
  misc_feature (1)...(481): n = A,T,C or G
gagttagctcctccacaaccttgatgaggtcgtctgcagtggcctctcgcttcataccgctnccatcgtcatactgtaggtttgccaccacctcctgcatcttggggcggctaatatccaggaaactctcaatcaagtcaccgtcnatnaaacctgtggctggttctgtcttccgctcggtgtgaaaggatctccagaaggagtgctcgatcttccccacacttttgatgactttattgagtcgattctgcatgtccagcaggaggttgtaccagctctctgacagtgaggtcaccagccctatcatgccnttgaacgtgccgaagaacaccgagccttgtgtggggggtgnagtctcacccagattctgcattaccaganagccgtggcaaaaganattgacaactcgcccaggnngaaaaagaacacctcctggaagtgctngccgctcctcgtccnttggtggnngcgcntncctttt

SEQ ID NO: 86 - DNA, 472 bp, Homo sapien
  misc_feature (1)...(472): n = A,T,C or G
aacatcttcctgtataatgctgtgtaatatcgatccgatnttgtctgctgagaattcattacttggaaaagcaacttnaagcctggacactggtattaaaattcacaatatgcaacactttaaacagtgtgtcaatctgctcccttactttgtcatcaccagtctgggaataagggtatgccctattcacacctgttaaaagggcgctaagcatttttgattcaacatctttttttttgacacaagtccgaaaaaagcaaaagtaaacagttnttaatttgttagccaattcactttcttcatgggacagagccatttgatttaaaaagcaaattgcataatattgagctttgggagctgatatntgagcggaagantagcctttctacttcaccagacacaactcctttcatattgggatgttnacnaaagttatgtctcttacagatgggatgcttttgtggcaattctg

SEQ ID NO: 87 - DNA, 413 bp, Homo sapien
  misc_feature (1)...(413): n = A,T,C or G
agaaaccagtatctctnaaaacaacctctcataccttgtggacctaattttgtgtgcgtgtgtgtgtgcgcgcatattatatagacaggcacatcttttttacttttgtaaaagcttatgcctctttggtatctatatctgtgaaagttttaatgatctgccataatgtcttggggacctttgtcttctgtgtaaatggtactagagaaaacacctatnttatgagtcaatctagttngttttattcgacatgaaggaaatttccagatnacaacactnacaaactctcccttgactaggggggacaaagaaaagcanaactgaacatnagaaacaattncctggtgagaaattncataaacagaaattgggtngtatattgaaananngcatcattnaaacgtttttttttt

SEQ ID NO: 88 - DNA, 448 bp, Homo sapien
  misc_feature (1)...(448): n = A,T,C or G
cgcagcgggtcctctctatctagctccagcctctcgcctgccccactccccgcgtcccgcgtcctagccnaccatggccgggcccctgcgcgccccgctgctcctgctggccatcctggccgtggccctggccgtgagccccgcggccggctccagtcccggcaagccgccgcgcctggtgggaggcccatggaccccgcgtggaagaagaaggtgtgcggcgtgcactggactttgccgtcggcnantacaacaaacccgcaacnacttttaccnagcncgcgctgcaggttgtgccgccccaancaaattgttactnggggtaantaattcttggaagttgaacctgggccaaacnngtttaccagaaccnagccaattngaacaattncccctccataacagccccttttaaaaagggaancantcctgntcttttccaaatttt

SEQ ID NO: 89 - DNA, 463 bp, Homo sapien
  misc_feature (1)...(463): n = A,T,C or G
gaattttgtgcactggccactgtgatggaaccattgggccaggatgctttgagtttatcagtagtgattctgccaaagttggtgttgtaacatgagtatgtaaaatgtcaaaaaattagcagaggtctaggtctgcatatcagcagacagtttgtccgtgtattttgtagccttgaagttctcagtgacaagttnnttctgatgcgaagttctnattccagtgttttagtcctttgcatctttnatgttnagacttgcctctntnaaattgcttttgtnttctgcaggtactatctgtggtttaacaaaatagaannacttctctgcttngaanatttgaatatcttacatctnaaaatnaattctctccccatannaaaacccangcccttggganaatttgaaaaanggntccttcnnaattcnnanaanttcagntntcatacaacanaacnggancccc

SEQ ID NO: 90 - DNA, 400 bp, Homo sapien
  misc_feature (1)...(400): n = A,T,C or G
agggattgaaggtctnttntactgtcggactgttcanccaccaactctacaagttgctgtcttccactcactgtctgtaagcntnttaacccagactgtatcttcataaatagaacaaattcttcaccagtcacatcttctaggacctttttggattcagttagtataagctcttccacttcctttgttaagacttcatctggtaaagtcttaagttttgtagaaaggaatttaattgctcgttctctaacaatgtcctctccttgaagtatttggctgaacaacccacctnaagtccctttgtgcatccattttaaatatacttaatagggcattggtncactaggttaaattctgcaagagtcatctgtctgcaaaagttgcgttagtatatctgcca

SEQ ID NO: 91 - DNA, 480 bp, Homo sapien
  misc_feature (1)...(480): n = A,T,C or G
gagctcggatccaataatctttgtctgagggcagcacacatatncagtgccatggnaactggtctaccccacatgggagcagcatgccgtagntatataaggtcattccctgagtcagacatgcctctttgactaccgtgtgccagtgctggtgattctcacacacctccnnccgctctttgtggaaaaactggcacttgnctggaactagcaagacatcacttacaaattcacccacgagacacttgaaaggtgtaacaaagcgactcttgcattgctttttgtccctccggcaccagttgtcaatactaacccgctggtttgcctccatcacatttgtgatctgtagctctggatacatctcctgacagtactgaagaacttcttcttttgtttcaaaagcaactcttggtgcctgttngatcaggttcccatttcccagtccgaatgttcacatggcatatnttacttcccacaaaa

SEQ ID NO: 92 - DNA, 477 bp, Homo sapien
  misc_feature (1)...(477): n = A,T,C or G
atacagcccanatcccaccacgaagatgcgcttgttgactgagaacctgatgcggtcactggtcccgctgtagccccagcgactctccacctgctggaagcggttgatgctgcactccttcccacgcaggcagcagcggggccggtcaatgaactccactcgtggcttggggttgacggttaantgcaggaagaggctgaccacctcgcggtccaccaggatgcccgactgtgcgggacctgcagcgaaactcctcgatggtcatgagcgggaagcgaatgangcccagggccttgcccagaaccttccgcctgttctctggcgtcacctgcagctgctgccgctnacactcggcctcggaccagcggacaaacggcgttgaacagccgcacctcacggatgcccantgtgtcgcgctccaggaacggcnccagcgtgtccaggtcaatgtcggtgaancctccgcgggtaatggcg

SEQ ID NO: 93 - DNA, 377 bp, Homo sapien
  misc_feature (1)...(377): n = A,T,C or G
gaacggctggaccttgcctcgcattgtgctgctggcaggaataccttggcaagcagctccagtccgagcagccccagaccgctgccgcccgaagctaagcctgcctctggccttcccctccgcctcaatgcagaaccantagtgggagcactgtgtttagagttaagagtgaacactgtntgattttacttgggaatttcctctgttatatagcttttcccaatgctaatttccaaacaacaacaacaaaataacatgtttgcctgttnagttgtataaaagtangtgattctgtatntaaagaaaatattactgttacatatactgcttgcaanttctgtatttattggtnctctggaaataaatatattattaaa

SEQ ID NO: 94 - DNA, 495 bp, Homo sapien
  misc_feature (1)...(495): n = A,T,C or G
ccctttgaggggttagggtccagttcccagtggaagaaacaggccaggagaantgcgtgccgagctgangcagatttcccacagtgaccccagagccctgggctatagtctctgacccctccaaggaaagaccaccttctggggacatgggctggagggcaggacctagaggcaccaagggaaggccccattccggggctgttccccgaggaggaagggaaggggctctgtgtgccccccacgaggaanaggccctgantcctgggatcanacaccccttcacgtgtatccccacacaaatgcaagctcaccaaggtcccctctcagtcccttccctacaccctgaacggncactggcccacacccacccagancanccacccgccatggggaatgtnctcaaggaatcgcngggcaacgtggactctngtcccnnaagggggcagaatctccaatagangganngaacccttgctnanaaaaaaaaanaaaaaa

SEQ ID NO: 95 - DNA, 472 bp, Homo sapien
  misc_feature (1)...(472): n = A,T,C or G
ggttacttggtttcattgccaccacttagtggatgtcatttagaaccattttgtctgctccctctggaagccttgcgcagagcggactttgtaattgttggagaataactgctgaatttttagctgttttgagttgattcgcaccactgcaccacaactcaatatgaaaactatttnacttatttattatcttgtgaaaagtatacaatgaaaattttgttcatactgtatttatcaagtatgatgaaaagcaatagatatatattcttttattatgttnaattatgattgccattattaatcggcaaaatgtggagtgtatgttcttttcacagtaatatatgccttttgtaacttcacttggttattttattgtaaatgaattacaaaattcttaatttaagaaaatggtangttatatttanttcantaatttctttccttgtttacgttaattttgaaaagaatgcat

SEQ ID NO: 96 - DNA, 476 bp, Homo sapien
  misc_feature (1)...(476): n = A,T,C or G
ctgaagcatttcttcaaacttntctacttttgtcattgatacctgtagtaagttgacaatgtggtgaaatttcaaaattatatgtaacttctactagttttactttctcccccaagtcttttttaactcatgatttttacacacacaatccagaacttattatatagcctctaagtctttattcttcacagtagatgatgaaagagtcctccagtgtcttgngcanaatgttctagntatagctggatacatacngtgggagttctataaactcatacctcagtgggactnaaccaaaattgtgttagtctcaattcctaccacactgagggagcctcccaaatcactatattcttatctgcaggtactcctccagaaaaacngacagggcaggcttgcatgaaaaagtnacatctgcgttacaaagtctatcttcctcanangtctgtnaaggaacaatttaatcttctagcttt

SEQ ID NO: 97 - DNA, 479 bp, Homo sapien
  misc_feature (1)...(479): n = A,T,C or G
actctttctaatgctgatatgatcttgagtataagaatgcatatgtcactagaatggataaaataatgctgcaaacttaatgttcttatgcaaaatggaacgctaatgaaacacagcttacaatcgcaaatcaaaactcacaagtgctcatctgttgtagatttagtgtaataagacttagattgtgctccttcggatatgattgtttctcanatcttgggcaatnttccttagtcaaatcaggctactagaattctgttattggatatntgagagcatgaaatttttaanaatacacttgtgattatnaaattaatcacaaatttcacttatacctgctatcagcagctagaaaaacatntnntttttanatcaaagtattttgtgtttggaantgtnnaaatgaaatctgaatgtgggttcnatcttattttttcccngacnactanttncttttttagggnctattctganccatc

SEQ ID NO: 98 - DNA, 461 bp, Homo sapien
agtgacttgtcctccaacaaaaccccttgatcaagtttgtggcactgacaatcagacctatgctagttcctgtcatctattcgctactaaatgcagactggaggggaccaaaaaggggcatcaactccagctggattattttggagcctgcaaatctattcctacttgtacggactttgaagtgattcagtttcctctacggatgagagactggctcaagaatatcctcatgcagctttatgaagccactctgaacacgctggttatctagatgagaacagagaaataaagtcagaaaatttacctggagaaaagaggctttggctggggaccatcccattgaaccttctcttaaggactttaagaaaaactaccacatgttgtgtatcctggtgccggccgtttatgaactgaccaccctttggaataatcttgacgctcctgaacttgctcctctgcga

SEQ ID NO: 99 - DNA, 171 bp, Homo sapien
gtggccgcgcgcaggtgtttcctcgtaccgcagggccccctcccttccccaggcgtccctcggcgcctctgcgggcccgaggaggagcggctggcgggtggggggagtgtgacccaccctcggtgagaaaagccttctctagcgatctgagaggcgtgccttgggggtacc

SEQ ID NO: 100 - DNA, 269 bp, Homo sapien
cggccgcaagtgcaactccagctggggccgtgcggacgaagattctgccagcagttggtccgactgcgacgacggcggcggcgacagtcgcaggtgcagcgcgggcgcctggggtcttgcaaggctgagctgacgccgcagaggtcgtgtcacgtcccacgaccttgacgccgtcggggacagccggaacagagcccggtgaagcgggaggcctcggggagcccctcgggaagggcggcccgagagatacgcaggtgcaggtggccgcc

SEQ ID NO: 101 - DNA, 405 bp, Homo sapien
ttttttttttttttggaatctactgcgagcacagcaggtcagcaacaagtttattttgcagctagcaaggtaacagggtagggcatggttacatgttcaggtcaacttcctttgtcgtggttgattggtttgtctttatgggggcggggtggggtaggggaaacgaagcaaataacatggagtgggtgcaccctccctgtagaacctggttacaaagcttggggcagttcacctggtctgtgaccgtcattttcttgacatcaatgttattagaagtcaggatatcttttagagagtccactgttctggagggagattagggtttcttgccaaatccaacaaaatccactgaaaaagttggatgatcagtacgaataccgaggcatattctcatatcggtggcca

SEQ ID NO: 102 - DNA, 470 bp, Homo sapien
ttttttttttttttttttttttttttttttttttttttttttttttttttttttttttttggcacttaatccatttttatttcaaaatgtctacaaatttaatcccattatacggtattttcaaaatctaaattattcaaattagccaaatccttaccaaataatacccaaaaatcaaaaatatacttctttcagcaaacttgttacataaattaaaaaaatatatacggctggtgttttcaaagtacaattatcttaacactgcaaacattttaaggaactaaaataaaaaaaaacactccgcaaaggttaaagggaacaacaaattcttttacaacaccattataaaaatcatatctcaaatcttaggggaatatatacttcacacgggatcttaacttttactcactttgtttatttttttaaaccattgtttgggcccaacacaatggaatcccccctggactagt

SEQ ID NO: 103 - DNA, 581 bp, Homo sapien
ttttttttttttttttttgacccccctcttataaaaaacaagttaccattttattttacttacacatatttattttataattggtattagatattcaaaaggcagcttttaaaatcaaactaaatggaaactgccttagatacataattcttaggaattagcttaaaatctgcctaaagtgaaaatcttctctagctcttttgactgtaaatttttgactcttgtaaaacatccaaattcatttttcttgtctttaaaattatctaatctttccattttttccctattccaagtcaatttgcttctctagcctcatttcctagctcttatctactattagtaagtggcttttttcctaaaagggaaaacaggaagagaaatggcacacaaaacaaacattttatattcatatttctacctacgttaataaaatagcattttgtgaagccagctcaaaagaaggcttagatccttttatgtccattttagtcactaaacgatatcaaagtgccagaatgcaaaaggtttgtgaacatttattcaaaagctaatataagatatttcacatactcatctttctg

SEQ ID NO: 104 - DNA, 578 bp, Homo sapien
tttttttttttttttttttttttttctcttctttttttttgaaatgaggatcgagtttttcactctctagatagggcatgaagaaaactcatctttccagctttaaaataacaatcaaatctcttatgctatatcatattttaagttaaactaatgagtcactggcttatcttctcctgaaggaaatctgttcattcttctcattcatatagttatatcaagtactaccttgcatattgagaggtttttcttctctatttacacatatatttccatgtgaatttgtatcaaacctttattttcatgcaaactagaaaataatgtttcttttgcataagagaagagaacaatatagcattacaaaactgctcaaattgtttgttaagttatccattataattagttggcaggagctaatacaaatcacatttacgacagcaataataaaactgaagtaccagttaaatatccaaaataattaaaggaacatttttagcctgggtataattagctaattcactttacaagcatttattagaatgaattcacatgttattattcctagcccaacacaatgg

SEQ ID NO: 105 - DNA, 538 bp, Homo sapien
tttttttttttttttcagtaataatcagaacaatatttatttttatatttaaaattcatagaaaagtgccttacatttaataaaagtttgtttctcaaagtgatcagaggaattagatatgtcttgaacaccaatattaatttgaggaaaatacaccaaaatacattaagtaaattatttaagatcatagagcttgtaagtgaaaagataaaatttgacctcagaaactctgagcattaaaaatccactattagcaaataaattactatggacttcttgctttaattttgtgatgaatatggggtgtcactggtaaaccaacacattctgaaggatacattacttagtgatagattcttatgtactttgctaatacgtggatatgagttgacaagtttctctttcttcaatcttttaaggggcgagaaatgaggaagaaaagaaaaggattacgcatactgttctttctatggaaggattagatatgtttcctttgccaatattaaaaaaataataatgtttactactagtgaaaccc

SEQ ID NO: 106 - DNA, 473 bp, Homo sapien
ttttttttttttttttagtcaagtttctatttttattataattaaagtcttggtcatttcatttattagctctgcaacttacatatttaaattaaagaaacgttttagacaactgtacaatttataaatgtaaggtgccattattgagtaatatattcctccaagagtggatgtgtcccttctcccaccaactaatgaacagcaacattagtttaattttattagtagatatacactgctgcaaacgctaattctcttctccatccccatgtgatattgtgtatatgtgtgagttggtagaatgcatcacaatctacaatcaacagcaagatgaagctaggctgggctttcggtgaaaatagactgtgtctgtctgaatcaaatgatctgacctatcctcggtggcaagaactcttcgaaccgcttcctcaaaggcgctgccacatttgtggctctttgcacttgtttcaaaa

SEQ ID NO: 107 - DNA, 1621 bp, Homo sapien
cgccatggcactgcagggcatctcggtcatggagctgtccggcctggccccgggcccgttctgtgctatggtcctggctgacttcggggcgcgtgtggtacgcgtggaccggcccggctcccgctacgacgtgagccgcttgggccggggcaagcgctcgctagtgctggacctgaagcagccgcggggagccgccgtgctgcggcgtctgtgcaagcggtcggatgtgctgctggagcccttccgccgcggtgtcatggagaaactccagctgggcccagagattctgcagcgggaaaatccaaggcttatttatgccaggctgagtggatttggccagtcaggaagcttctgccggttagctggccacgatatcaactatttggctttgtcaggtgttctctcaaaaattggcagaagtggtgagaatccgtatgccccgctgaatctcctggctgactttgctggtggtggccttatgtgtgcactgggcattataatggctctttttgaccgcacacgcactgacaagggtcaggtcattgatgcaaatatggtggaaggaacagcatatttaagttcttttctgtggaaaactcagaaatcgagtctgtgggaagcacctcgaggacagaacatgttggatggtggagcacctttctatacgacttacaggacagcagatggggaattcatggctgttggagcaatagaaccccagttctacgagctgctgatcaaaggacttggactaaagtctgatgaacttcccaatcagatgagcatggatgattggccagaaatgaagaagaagtttgcagatgtatttgcaaagaagacgaaggcagagtggtgtcaaatctttgacggcacagatgcctgtgtgactccggttctgacttttgaggaggttgttcatcatgatcacaacaaggaacggggctcgtttatcaccagtgaggagcaggacgtgagcccccgccctgcacctctgctgttaaacaccccagccatcccttctttcaaaagggatcctttcataggagaacacactgaggagatacttgaagaatttggattcagccgcgaagagatttatcagcttaactcagataaaatcattgaaagtaataaggtaaaagctagtctctaacttccaggcccacggctcaagtgaatttgaatactgcatttacagtgtagagtaacacataacattgtatgcatggaaacatggaggaacagtattacagtgtcctaccactctaatcaagaaaagaattacagactctgattctacagtgatgattgaattctaaaaatggttatcattagggcttttgatttataaaactttgggtacttatactaaattatggtagttattctgccttccagtttgcttgatatatttgttgatattaagattcttgacttatattttgaatgggttctagtgaaaaaggaatgatatattcttgaagacatcgatatacatttatttacactcttgattctacaatgtagaaaatgaggaaatgccacaaattgtatggtgataaaagtcacgtgaaacaaaaaaaaaaaaaaaaaaaaaaaaaaaaaaaaaaaaaaaaaaaaa

SEQ ID NO: 108 - protein, 382 aa, Homo sapien [sequence omitted]

SEQ ID NO: 109 - DNA, 1524 bp, Homo sapien
ggcacgaggctgcgccagggcctgagcggaggcgggggcagcctcgccagcgggggccccgggcctggccatgcctcactgagccagcgcctgcgcctctacctcgccgacagctggaaccagtgcgacctagtggctctcacctgcttcctcctgggcgtgggctgccggctgaccccgggtttgtaccacctgggccgcactgtcctctgcatcgacttcatggttttcacggtgcggctgcttcacatcttcacggtcaacaaacagctggggcccaagatcgtcatcgtgagcaagatgatgaaggacgtgttcttcttcctcttcttcctcggcgtgtggctggtagcctatggcgtggccacggaggggctcctgaggccacgggacagtgacttcccaagtatcctgcgccgcgtcttctaccgtccctacctgcagatcttcgggcagattccccaggaggacatggacgtggccctcatggagcacagcaactgctcgtcggagcccggcttctgggcacaccctcctggggcccaggcgggcacctgcgtctcccagtatgccaactggctggtggtgctgctcctcgtcatcttcctgctcgtggccaacatcctgctggtcaacttgctcattgccatgttcagttacacattcggcaaagtacagggcaacagcgatctctactggaaggcgcagcgttaccgcctcatccgggaattccactctcggcccgcgctggccccgccctttatcgtcatctcccacttgcgcctcctgctcaggcaattgtgcaggcgaccccggagcccccagccgtcctccccggccctcgagcatttccgggtttacctttctaaggaagccgagcggaagctgctaacgtgggaatcggtgcataaggagaactttctgctggcacgcgctagggacaagcgggagagcgactccgagcgtctgaagcgcacgtcccagaaggtggacttggcactgaaacagctgggacacatccgcgagtacgaacagcgcctgaaagtgctggagcgggaggtccagcagtgtagccgcgtcctggggtgggtggccgaggccctgagccgctctgccttgctgcccccaggtgggccgccaccccctgacctgcctgggtccaaagactgagccctgctggcggacttcaaggagaagcccccacaggggattttgctcctagagtaaggctcatctgggcctcggcccccgcacctggtggccttgtccttgaggtgagccccatgtccatctgggccactgtcaggaccacctttgggagtgtcatccttacaaaccacagcatgcccggctcctcccagaaccagtcccagcctgggaggatcaaggcctggatcccgggccgttatccatctggaggctgcagggtccttggggtaacagggaccacagacccctcaccactcacagattcctcacactggggaaataaagccatttcagaggaaaaaaaaaaaaaaaaaa

SEQ ID NO: 110 - DNA, 3410 bp, Homo sapien
gggaaccagcctgcacgcgctggctccgggtgacagccgcgcgcctcggccaggatctgagtgatgagacgtgtccccactgaggtgccccacagcagcaggtgttgagcatgggctgagaagctggaccggcaccaaagggctggcagaaatgggcgcctggctgattcctaggcagttggcggcagcaaggaggagaggccgcagcttctggagcagagccgagacgaagcagttctggagtgcctgaacggccccctgagccctacccgcctggcccactatggtccagaggctgtgggtgagccgcctgctgcggcaccggaaagcccagctcttgctggtcaacctgctaacctttggcctggaggtgtgtttggccgcaggcatcacctatgtgccgcctctgctgctggaagtgggggtagaggagaagttcatgaccatggtgctgggcattggtccagtgctgggcctggtctgtgtcccgctcctaggctcagccagtgaccactggcgtggacgctatggccgccgccggcccttcatctgggcactgtccttgggcatcctgctgagcctctttctcatcccaagggccggctggctagcagggctgctgtgcccggatcccaggcccctggagctggcactgctcatcctgggcgtggggctgctggacttctgtggccaggtgtgcttcactccactggaggccctgctctctgacctcttccgggacccggaccactgtcgccaggcctactctgtctatgccttcatgatcagtcttgggggctgcctgggctacctcctgcctgccattgactgggacaccagtgccctggccccctacctgggcacccaggaggagtgcctctttggcctgctcaccctcatcttcctcacctgcgtagcagccacactgctggtggctgaggaggcagcgctgggccccaccgagccagcagaagggctgtcggccccctccttgtcgccccactgctgtccatgccgggcccgcttggctttccggaacctgggcgccctgcttccccggctgcaccagctgtgctgccgcatgccccgcaccctgcgccggctcttcgtggctgagctgtgcagctggatggcactcatgaccttcacgctgttttacacggatttcgtgggcgaggggctgtaccagggcgtgcccagagctgagccgggcaccgaggcccggagacactatgatgaaggcgttcggatgggcagcctggggctgttcctgcagtgcgccatctccctggtcttctctctggtcatggaccggctggtgcagcgattcggcactcgagcagtctatttggccagtgtggcagctttccctgtggctgccggtgccacatgcctgtcccacagtgtggccgtggtgacagcttcagccgccctcaccgggttcaccttctcagccctgcagatcctgccctacacactggcctccctctaccaccgggagaagcaggtgttcctgcccaaataccgaggggacactggaggtgctagcagtgaggacagcctgatgaccagcttcctgccaggccctaagcctggagctcccttccctaatggacacgtgggtgctggaggcagtggcctgctcccacctccacccgcgctctgcggggcctctgcctgtgatgtctccgtacgtgtggtggtgggtgagcccaccgaggccagggtggttccgggccggggcatctgcctggacctcgccatcctggatagtgccttcctgctgtcccaggtggccccatccctgtttatgggctccattgtccagctcagccagtctgtcactgcctatatggtgtctgccgcaggcctgggtctggtcgccatttactttgctacacaggtagtatttgacaagagcgacttggccaaatactcagcgtagaaaacttccagcacattggggtggagggcctgcctcactgggtcccagctccccgctcctgttagccccatggggctgccgggctggccgccagtttctgttgctgccaaagtaatgtggctctctgctgccaccctgtgctgctgaggtgcgtagctgcacagctgggggctggggcgtccctctcctctctccccagtctctagggctgcctgactggaggccttccaagggggtttcagtctggacttatacagggaggccagaagggctccatgcactggaatgcggggactctgcaggtggattacccaggctcagggttaacagctagcctcctagttgagacacacctagagaagggtttttgggagctgaataaactcagtcacctggtttcccatctctaagccccttaacctgcagcttcgtttaatgtagctcttgcatgggagtttctaggatgaaacactcctccatgggatttgaacatatgacttatttgtaggggaagagtcctgaggggcaacacacaagaaccaggtcccctcagcccacagcactgtctttttgctgatccacccccctcttaccttttatcaggatgtggcctgttggtccttctgttgccatcacagagacacaggcatttaaatatttaacttatttatttaacaaagtagaagggaatccattgctagcttttctgtgttggtgtctaatatttgggtagggtgggggatccccaacaatcaggtcccctgagatagctggtcattgggctgatcattgccagaatcttcttctcctggggtctggccccccaaaatgcctaacccaggaccttggaaattctactcatcccaaatgataattccaaatgctgttacccaaggttagggtgttgaaggaaggtagagggtggggcttcaggtctcaacggcttccctaaccacccctcttctcttggcccagcctggttccccccacttccactcccctctactctctctaggactgggctgatgaaggcactgcccaaaatttcccctacccccaactttcccctacccccaactttccccaccagctccacaaccctgtttggagctactgcaggaccagaagcacaaagtgcggtttcccaagcctttgtccatctcagcccccagagtatatctgtgcttggggaatctcacacagaaactcaggagcaccccctgcctgagctaagggaggtcttatctctcagggggggtttaagtgccgtttgcaataatgtcgtcttatttatttagcggggtgaatattttatactgtaagtgagcaatcagagtataatgtttatggtgacaaaattaaaggctttcttatatgtttaaaaaaaaaaaaaaaaaaaaaaaaaaaaaaaaaaaaaaaaaaaraaaaaaaaaaaaaaaaaaaaaaaaaaaataaaaaaaaaaaa

SEQ ID NO: 111 - DNA, 1289 bp, Homo sapien
agccaggcgtccctctgcctgcccactcagtggcaacacccgggagctgttttgtcctttgtggagcctcagcagttccctctttcagaactcactgccaagagccctgaacaggagccaccatgcagtgcttcagcttcattaagaccatgatgatcctcttcaatttgctcatctttctgtgtggtgcagccctgttggcagtgggcatctgggtgtcaatcgatggggcatcctttctgaagatcttcgggccactgtcgtccagtgccatgcagtttgtcaacgtgggctacttcctcatcgcagccggcgttgtggtctttgctcttggtttcctgggctgctatggtgctaagactgagagcaagtgtgccctcgtgacgttcttcttcatcctcctcctcatcttcattgctgaggttgcagctgctgtggtcgccttggtgtacaccacaatggctgagcacttcctgacgttgctggtagtgcctgccatcaagaaagattatggttcccaggaagacttcactcaagtgtggaacaccaccatgaaagggctcaagtgctgtggcttcaccaactatacggattttgaggactcaccctacttcaaagagaacagtgcctttcccccattctgttgcaatgacaacgtcaccaacacagccaatgaaacctgcaccaagcaaaaggctcacgaccaaaaagtagagggttgcttcaatcagcttttgtatgacatccgaactaatgcagtcaccgtgggtggtgtggcagctggaattgggggcctcgagctggctgccatgattgtgtccatgtatctgtactgcaatctacaataagtccacttctgcctctgccactactgctgccacatgggaactgtgaagaggcaccctggcaagcagcagtgattgggggaggggacaggatctaacaatgtcacttgggccagaatggacctgccctttctgctccagacttggggctagatagggaccactccttttagcgatgcctgactttccttccattggtgggtggatgggtggggggcattccagagcctctaaggtagccagttctgttgcccattcccccagtctattaaacccttgatatgccccctaggcctagtggtgatcccagtgctctactgggggatgagagaaaggcattttatagcctgggcataagtgaaatcagcagagcctctgggtggatgtgtagaaggcacttcaaaatgcataaacctgttacaatgttaaaaaaaaaaaaaaaaa

SEQ ID NO: 112 - protein, 315 aa, Homo sapien
MVFTVRLLHIFTVNKQLGPKIVIVSKMMKDVFFFLFFLGVWLVAYGVATEGLLRPRDSDFPSILRRVFYRPYLQIFGQIPQEDMDVALMEHSNCSSEPGFWAHPPGAQAGTCVSQYANWLVVLLLVIFLLVANILLVNLLIAMFSYTFGKVQGNSDLYWKAQRYRLIREFHSRPALAPPFIVISHLRLLLRQLCRRPRSPQPSSPALEHFRVYLSKEAERKLLTWESVHKENFLLARARDKRESDSERLKRTSQKVDLALKQLGHIREYEQRLKVLEREVQQCSRVLGWVAEALSRSALLPPGGPPPPDLPGSKD

SEQ ID NO: 113 - protein, 553 aa, Homo sapien
MVQRLWVSRLLRHRKAQLLLVNLLTFGLEVCLAAGITYVPPLLLEVGVEEKFMTMVLGIGPVLGLVCVPLLGSASDHWRGRYGRRRPFIWALSLGILLSLFLIPRAGWLAGLLCPDPRPLELALLILGVGLLDFCGQVCFTPLEALLSDLFRDPDHCRQAYSVYAFMISLGGCLGYLLPAIDWDTSALAPYLGTQEECLFGLLTLIFLTCVAATLLVAEEAALGPTEPAEGLSAPSLSPHCCPCRARLAFRNLGALLPRLHQLCCRMPRTLRRLFVAELCSWMALMTFTLFYTDFVGEGLYQGVPRAEPGTEARRHYDEGVRMGSLGLFLQCAISLVFSLVMDRLVQRFGTRAVYLASVAAFPVAAGATCLSHSVAVVTASAALTGFTFSALQILPYTLASLYHREKQVFLPKYRGDTGGASSEDSLMTSFLPGPKPGAPFPNGHVGAGGSGLLPPPPALCGASACDVSVRVVVGEPTEARVVPGRGICLDLAILDSAFLLSQVAPSLFMGSIVQLSQSVTAYMVSAAGLGLVAIYFATQVVFDKSDLAKYSA

SEQ ID NO: 114 - protein, 241 aa, Homo sapien
MQCFSFIKTMMILFNLLIFLCGAALLAVGIWVSIDGASFLKIFGPLSSSAMQFVNVGYFLIAAGVVVFALGFLGCYGAKTESKCALVTFFFILLLIFIAEVAAAVVALVYTTMAEHFLTLLVVPAIKKDYGSQEDFTQVWNTTMKGLKCCGFTNYTDFEDSPYFKENSAFPPFCCNDNVTNTANETCTKQKAHDQKVEGCFNQLLYDIRTNAVTVGGVAAGIGGLELAAMIVSMYLYCNLQ

SEQ ID NO: 115 - DNA, 366 bp, Homo sapien
gctctttctctcccctcctctgaatttaattctttcaacttgcaatttgcaaggattacacatttcactgtgatgtatattgtgttgcaaaaaaaaaaaagtgtctttgtttaaaattacttggtttgtgaatccatcttgctttttccccattggaactagtcattaacccatctctgaactggtagaaaaacatctgaagagctagtctatcagcatctgacaggtgaattggatggttctcagaaccatttcacccagacagcctgtttctatcctgtttaataaattagtttgggttctctacatgcataacaaaccctgctccaatctgtcacataaaagtctgtgacttgaagtttagtc

SEQ ID NO: 116 - DNA, 282 bp, Homo sapien
  misc_feature (1)...(282): n = A,T,C or G
acaaagatgaaccatttcctatattatagcaaaattaaaatctacccgtattctaatattgagaaatgagatnaaacacaatnttataaagtctacttagagaagatcaagtgacctcaaagactttactattttcatattttaagacacatgatttatcctattttagtaacctggttcatacgttaaacaaaggataatgtgaacagcagagaggatttgttggcagaaaatctatgttcaatctngaactatctanatcacagacatttctattccttt

SEQ ID NO: 117 - DNA, 305 bp, Homo sapien
  misc_feature (1)...(305): n = A,T,C or G
acacatgtcgcttcactgccttcttagatgcttctggtcaacatanaggaacagggaccatatttatcctccctcctgaaacaattgcaaaataanacaaaatatatgaaacaattgcaaaataaggcaaaatatatgaaacaacaggtctcgagatattggaaatcagtcaatgaaggatactgatccctgatcactgtcctaatgcaggatgtgggaaacagatgaggtcacctctgtgactgccccagcttactgcctgtagagagtttctangctgcagttcagacagggagaaattgggt

SEQ ID NO: 118 - DNA, 71 bp, Homo sapien
  misc_feature (1)...(71): n = A,T,C or G
accaaggtgtntgaatctctgacgtggggatctctgattcccgcacaatctgagtggaaaaantcctgggt

SEQ ID NO: 119 - DNA, 212 bp, Homo sapien
  misc_feature (1)...(212): n = A,T,C or G
actccggttggtgtcagcagcacgtggcattgaacatngcaatgtggagcccaaaccacagaaaatggggtgaaattggccaactttctatnaacttatgttggcaantttgccaccaacagtaagctggcccttctaataaaagaaaattgaaaggtttctcactaancggaattaantaatggantcaaganactcccaggcctcagcgt

SEQ ID NO: 120 - DNA, 90 bp, Homo sapien
  misc_feature (1)...(90): n = A,T,C or G
actcgttgcanatcaggggccccccagagtcaccgttgcaggagtccttctggtcttgccctccgccggcgcagaacatgctggggtggt

SEQ ID NO: 121 - DNA, 218 bp, Homo sapien
  misc_feature (1)...(218): n = A,T,C or G
tgtancgtgaanacgacaganagggttgtcaaaaatggagaanccttgaagtcattttgagaataagatttgctaaaagatttggggctaaaacatggttattgggagacatttctgaagatatncangtaaattanggaatgaattcatggttcttttgggaattcctttacgatngccagcatanacttcatgtggggatancagctacccttgta

SEQ ID NO: 122 - DNA, 171 bp, Homo sapien
taggggtgtatgcaactgtaaggacaaaaattgagactcaactggcttaaccaataaaggcatttgttagctcatggaacaggaagtcggatggtggggcatcttcagtgctgcatgagtcaccaccccggcggggtcatctgtgccacaggtccctgttgacagtgcggt

SEQ ID NO: 123 - DNA, 76 bp, Homo sapien
  misc_feature (1)...(76): n = A,T,C or G
tgtagcgtgaagacnacagaatggtgtgtgctgtgctatccaggaacacatttattatcattatcaantattgtgt

SEQ ID NO: 124 - DNA, 131 bp, Homo sapien
acctttccccaaggccaatgtcctgtgtgctaactggccggctgcaggacagctgcaattcaatgtgctgggtcatatggaggggaggagactctaaaatagccaattttattctcttggttaagatttgt

SEQ ID NO: 125 - DNA, 432 bp, Homo sapien
actttatctactggctatgaaatagatggtggaaaattgcgttaccaactataccactggcttgaaaaagaggtgatagctcttcagaggacttgtgacttttgctcagatgctgaagaactacagtctgcatttggcagaaatgaagatgaatttggattaaatgaggatgctgaagatttgcctcaccaaacaaaagtgaaacaactgagagaaaattttcaggaaaaaagacagtggctcttgaagtatcagtcacttttgagaatgtttcttagttactgcatacttcatggatcccatggtgggggtcttgcatctgtaagaatggaattgattttgcttttgcaagaatctcagcaggaaacatcagaaccactattttctagccctctgtcagagcaaacctcagtgcctctcctctttgcttgt

SEQ ID NO: 126 - DNA, 112 bp, Homo sapien
acacaacttgaatagtaaaatagaaactgagctgaaatttctaattcactttctaaccatagtaagaatgatatttccccccagggatcaccaaatatttataaaaatttgt

SEQ ID NO: 127 - DNA, 54 bp, Homo sapien
accacgaaaccacaaacaagatggaagcatcaatccacttgccaagcacagcag

SEQ ID NO: 128 - DNA, 323 bp, Homo sapien
acctcattagtaattgttttgttgtttcatttttttctaatgtctcccctctaccagctcacctgagataacagaatgaaaatggaaggacagccagatttctcctttgctctctgctcattctctctgaagtctaggttacccattttggggacccattataggcaataaacacagttcccaaagcatttggacagtttcttgttgtgttttagaatggttttcctttttcttagccttttcctgcaaaaggctcactcagtcccttgcttgctcagtggactgggctccccagggcctaggctgccttcttttccatgtcc

SEQ ID NO: 129 - DNA, 192 bp, Homo sapien
  misc_feature (1)...(192): n = A,T,C or G
acatacatgtgtgtatatttttaaatatcacttttgtatcactctgactttttagcatactgaaaacacactaacataatttntgtgaaccatgatcagatacaacccaaatcattcatctagcacattcatctgtgatanaaagataggtgagtttcatttccttcacgttggccaatggataaacaaagt

SEQ ID NO: 130 - DNA, 362 bp, Homo sapien
  misc_feature (1)...(362): n = A,T,C or G
cccttttttatggaatgagtagactgtatgtttgaanatttanccacaacctctttgacatataatgacgcaacaaaaaggtgctgtttagtcctatggttcagtttatgcccctgacaagtttccattgtgttttgccgatcttctggctaatcgtggtatcctccatgttattagtaattctgtattccattttgttaacgcctggtagatgtaacctgctangaggctaactttatacttatttaaaagctcttattttgtggtcattaaaatggcaatttatgtgcagcactttattgcagcaggaagcacgtgtgggttggttgtaaagctctttgctaatcttaaaaagtaatggg

SEQ ID NO: 131 - DNA, 332 bp, Homo sapien
  misc_feature (1)...(332): n = A,T,C or G
ctttttgaaagatcgtgtccactcctgtggacatcttgttttaatggagtttcccatgcagtangactggtatggttgcagctgtccagataaaaacatttgaagagctccaaaatgagagttctcccaggttcgccctgctgctccaagtctcagcagcagcctcttttaggaggcatcttctgaactagattaaggcagcttgtaaatctgatgtgatttggtttattatccaactaacttccatctgttatcactggagaaagcccagactccccangacnggtacggattgtgggcatanaaggattgggtgaagctggcgttgtggt

SEQ ID NO: 132 - DNA, 322 bp, Homo sapien
  misc_feature (1)...(322): n = A,T,C or G
acttttgccattttgtatatataaacaatcttgggacattctcctgaaaactaggtgtccagtggctaagagaactcgatttcaagcaattctgaaaggaaaaccagcatgacacagaatctcaaattcccaaacaggggctctgtgggaaaaatgagggaggacctttgtatctcgggttttagcaagttaaaatgaanatgacaggaaaggcttatttatcaacaaagagaagagttgggatgcttctaaaaaaaactttggtagagaaaataggaatgctnaatcctagggaagcctgtaacaatctacaattggtcca

SEQ ID NO: 133 - DNA, 278 bp, Homo sapien
  misc_feature (1)...(278): n = A,T,C or G
acaagccttcacaagtttaactaaattgggattaatctttctgtanttatctgcataattcttgtttttctttccatctggctcctgggttgacaatttgtggaaacaactctattgctactatttaaaaaaaatcacaaatctttccctttaagctatgttnaattcaaactattcctgctattcctgttttgtcaaagaaattatatttttcaaaatatgtntatttgtttgatgggtcccacgaaacactaataaaaaccacagagaccagcctg

SEQ ID NO: 134 - DNA, 121 bp, Homo sapien
  misc_feature (1)...(121): n = A,T,C or G
gtttanaaaacttgtttagctccatagaggaaagaatgttaaactttgtattttaaaacatgattctctgaggttaaacttggttttcaaatgttatttttacttgtattttgcttttggt

SEQ ID NO: 135 - DNA, 350 bp, Homo sapien
  misc_feature (1)...(350): n = A,T,C or G
acttanaaccatgcctagcacatcagaatccctcaaagaacatcagtataatcctataccatancaagtggtgactggttaagcgtgcgacaaaggtcagctggcacattacttgtgtgcaaacttgatacttttgttctaagtaggaactagtatacagtncctaggantggtactccagggtgccccccaactcctgcagccgctcctctgtgccagnccctgnaaggaactttcgctccacctcaatcaagccctgggccatgctacctgcaattggctgaacaaacgtttgctgagttcccaaggatgcaaagcctggtgctcaactcctggggcgtcaactcagt

SEQ ID NO: 136 - DNA, 399 bp, Homo sapien
  misc_feature (1)...(399): n = A,T,C or G
tgtaccgtgaagacgacagaagttgcatggcagggacagggcagggccgaggccagggttgctgtgattgtatccgaatantcctcgtgagaaaagataatgagatgacgtgagcagcctgcagacttgtgtctgccttcaanaagccagacaggaaggccctgcctgccttggctctgacctggcggccagccagccagccacaggtgggcttcttccttttgtggtgacaacnccaagaaaactgcagaggcccagggtcaggtgtnagtgggtangtgaccataaaacaccaggtgctcccaggaacccgggcaaaggccatccccacctacagccagcatgcccactggcgtgatgggtgcaganggatgaagcagccagntgttctgctgtggt

SEQ ID NO: 137 - DNA, 165 bp, Homo sapien
  misc_feature (1)...(165): n = A,T,C or G
actggtgtggtngggggtgatgctggtggtanaagttgangtgacttcangatggtgtgtggaggaagtgtgtgaacgtagggatgtagangttttggccgtgctaaatgagcttcgggattggctggtcccactggtggtcactgtcattggtggggttcctgt

SEQ ID NO: 138 - DNA, 338 bp, Homo sapien
  misc_feature (1)...(338): n = A,T,C or G
actcactggaatgccacattcacaacagaatcagaggtctgtgaaaacattaatggctccttaacttctccagtaagaatcagggacttgaaatggaaacgttaacagccacatgcccaatgctgggcagtctcccatgccttccacagtgaaagggcttgagaaaaatcacatccaatgtcatgtgtttccagccacaccaaaaggtgcttggggtggagggctgggggcatananggtcangcctcaggaagcctcaagttccattcagctttgccactgtacattccccatntttaaaaaaactgatgccttttttttttttttttgtaaaattc

SEQ ID NO: 139 - DNA, 382 bp, Homo sapien
gggaatcttggtttttggcatctggtttgcctatagccgaggccactttgacagaacaaagaaagggacttcgagtaagaaggtgatttacagccagcctagtgcccgaagtgaaggagaattcaaacagacctcgtcattcctggtgtgagcctggtcggctcaccgcctatcatctgcatttgccttactcaggtgctaccggactctggcccctgatgtctgtagtttcacaggatgccttatttgtcttctacaccccacagggccccctacttcttcggatgtgtttttaataatgtcagctatgtgccccatcctccttcatgccctccctccctttcctaccactgctgagtggcctggaacttgtttaaagtgt

SEQ ID NO: 140 - DNA, 200 bp, Homo sapien
  misc_feature (1)...(200): n = A,T,C or G
accaaancttctttctgttgtgttngattttactataggggtttngcttnttctaaanatacttttcatttaacancttttgttaagtgtcaggctgcactttgctccatanaattattgttttcacatttcaacttgtatgtgtttgtctcttanagcattggtgaaatcacatattttatattcagcataaaggagaa

SEQ ID NO: 141 - DNA, 335 bp, Homo sapien
  misc_feature (1)...(335): n = A,T,C or G
actttattttcaaaacactcatatgttgcaaaaaacacatagaaaaataaagtttggtgggggtgctgactaaacttcaagtcacagacttttatgtgacagattggagcagggtttgttatgcatgtagagaacccaaactaatttattaaacaggatagaaacaggctgtctgggtgaaatggttctgagaaccatccaattcacctgtcagatgctgatanactagctcttcagatgtttttctaccagttcagagatnggttaatgactanttccaatggggaaaaagcaagatggattcacaaaccaagtaattttaaacaaagacactt

SEQ ID NO: 142 - DNA, 459 bp, Homo sapien
  misc_feature (1)...(459): n = A,T,C or G
accaggttaatattgccacatatatcctttccaattgcgggctaaacagacgtgtatttagggttgtttaaagacaacccagcttaatatcaagagaaattgtgacctttcatggagtatctgatggagaaaacactgagttttgacaaatcttattttattcagatagcagtctgatcacacatggtccaacaacactcaaataataaatcaaatatnatcagatgttaaagattggtcttcaaacatcatagccaatgatgccccgcttgcctataatctctccgacataaaaccacatcaacacctcagtggccaccaaaccattcagcacagcttccttaactgtgagctgtttgaagctaccagtctgagcactattgactatntttttcangctctgaatagctctagggatctcagcangggtgggaggaaccagctcaaccttggcgtant

SEQ ID NO: 143 - DNA, 140 bp, Homo sapien
acatttccttccaccaagtcaggactcctggcttctgtgggagttcttatcacctgagggaaatccaaacagtctctcctagaaaggaatagtgtcaccaaccccacccatctccctgagaccatccgacttccctgtgt

SEQ ID NO: 144 - DNA, 164 bp, Homo sapien
  misc_feature (1)...(164): n = A,T,C or G
acttcagtaacaacatacaataacaacattaagtgtatattgccatctttgtcattttctatctataccactctcccttctgaaaacaanaatcactanccaatcacttatacaaatttgaggcaattaatccatatttgttttcaataaggaaaaaaagatgt

SEQ ID NO: 145 - DNA, 303 bp, Homo sapien
  misc_feature (1)...(303): n = A,T,C or G
acgtagaccatccaactttgtatttgtaatggcaaacatccagnagcaattcctaaacaaactggagggtatttatacccaattatcccattcattaacatgccctcctcctcaggctatgcaggacagctatcataagtcggcccaggcatccagatactaccatttgtataaacttcagtaggggagtccatccaagtgacaggtctaatcaaaggaggaaatggaacataagcccagtagtaaaatnttgcttagctgaaacagccacaaaagacttaccgccgtggtgattaccatcaa

SEQ ID NO: 146 - DNA, 327 bp, Homo sapien
  misc_feature (1)...(327): n = A,T,C or G
actgcagctcaattagaagtggtctctgactttcatcancttctccctgggctccatgacactggcctggagtgactcattgctctggttggttgagagagctcctttgccaacaggcctccaagtcagggctgggatttgtttcctttccacattctagcaacaatatgctggccacttcctgaacagggagggtgggaggagccagcatggaacaagctgccactttctaaagtagccagacttgcccctgggcctgtcacacctactgatgaccttctgtgcctgcaggatggaatgtaggggtgagctgtgtgactctatggt

SEQ ID NO: 147 - DNA, 173 bp, Homo sapien
  misc_feature (1)...(173): n = A,T,C or G
acattgtttttttgagataaagcattganagagctctccttaacgtgacacaatggaaggactggaacacatacccacatctttgttctgagggataattttctgataaagtcttgctgtatattcaagcacatatgttatatattattcagttccatgtttatagcctagtt

SEQ ID NO: 148 - DNA, 477 bp, Homo sapien
  misc_feature (1)...(477): n = A,T,C or G
acaaccactttatctcatcgaatttttaacccaaactcactcactgtgcctttctatcctatgggatatattatttgatgctccatttcatcacacatatatgaataatacactcatactgccctactacctgctgcaataatcacattcccttcctgtcctgaccctgaagccattggggtggtcctagtggccatcagtccangcctgcaccttgagcccttgagctccattgctcacnccancccacctcaccgaccccatcctcttacacagctacctccttgctctctaaccccatagattatntccaaattcagtcaattaagttactattaacactctacccgacatgtccagcaccactggtaagccttctccagccaacacacacacacacacacncacacacacacatatccaggcacaggctacctcatcttcacaatcacccctttaattaccatgctatggtgg

SEQ ID NO: 149 - DNA, 207 bp, Homo sapien
acagttgtattataatatcaagaaataaacttgcaatgagagcatttaagagggaagaactaacgtattttagagagccaaggaaggtttctgtggggagtgggatgtaaggtggggcctgatgataaataagagtcagccaggtaagtgggtggtgtggtatgggcacagtgaagaacatttcaggcagagggaacagcagtgaaa

SEQ ID NO: 150 - DNA, 111 bp, Homo sapien
  misc_feature (1)...(111): n = A,T,C or G
accttgatttcattgctgctctgatggaaacccaactatctaatttagctaaaacatgggcacttaaatgtggtcagtgtttggacttgttaactantggcatctttgggt

SEQ ID NO: 151 - DNA, 196 bp, Homo sapien
agcgcggcaggtcatattgaacattccagatacctatcattactcgatgctgttgataacagcaagatggctttgaactcagggtcaccaccagctattggaccttactatgaaaaccatggataccaaccggaaaacccctatcccgcacagcccactgtggtccccactgtctacgaggtgcatccggctcagt

SEQ ID NO: 152 - DNA, 132 bp, Homo sapien
acagcactttcacatgtaagaagggagaaattcctaaatgtaggagaaagataacagaaccttccccttttcatctagtggtggaaacctgatgctttatgttgacaggaatagaaccaggagggagtttgt

SEQ ID NO: 153 - DNA, 285 bp, Homo sapien
  misc_feature (1)...(285): n = A,T,C or G
acaanacccanganaggccactggccgtggtgtcatggcctccaaacatgaaagtgtcagcttctgctcttatgtcctcatctgacaactctttaccatttttatcctcgctcagcaggagcacatcaataaagtccaaagtcttggacttggccttggcttggaggaagtcatcaacaccctggctagtgagggtgcggcgccgctcctggatgacggcatctgtgaagtcgtgcaccagtctgcaggccctgtggaagcgccgtccacacggagtnaggaatt

SEQ ID NO: 154 - DNA, 333 bp, Homo sapien
accacagtcctgttgggccagggcttcatgaccctttctgtgaaaagccatattatcaccaccccaaatttttccttaaatatctttaactgaaggggtcagcctcttgactgcaaagaccctaagccggttacacagctaactcccactggccctgatttgtgaaattgctgctgcctgattggcacaggagtcgaaggtgttcagctcccctcctccgtggaacgagactctgatttgagtttcacaaattctcgggccacctcgtcattgctcctctgaaataaaatccggagaatggtcaggcctgtctcatccatatggatcttccgg

SEQ ID NO: 155 - DNA, 308 bp, Homo sapien
  misc_feature (1)...(308): n = A,T,C or G
actggaaataataaaacccacatcacagtgttgtgtcaaagatcatcagggcatggatgggaaagtgctttgggaactgtaaagtgcctaacacatgatcgatgatttttgttataatatttgaatcacggtgcatacaaactctcctgcctgctcctcctgggccccagccccagccccatcacagctcactgctctgttcatccaggcccagcatgtagtggctgattcttcttggctgcttttagcctccanaagtttctctgaagccaaccaaacctctangtgtaaggcatgctggccctggt

SEQ ID NO: 156 - DNA, 295 bp, Homo sapien
accttgctcggtgcttggaacatattaggaactcaaaatatgagatgataacagtgcctattattgattactgagagaactgttagacatttagttgaagattttctacacaggaactgagaataggagattatgtttggccctcatattctctcctatcctccttgcctcattctatgtctaatatattctcaatcaaataaggttagcataatcaggaaatcgaccaaataccaatataaaaccagatgtctatccttaagattttcaaatagaaaacaaattaacagactat

SEQ ID NO: 157 - DNA, 126 bp, Homo sapien
acaagtttaaatagtgctgtcactgtgcatgtgctgaaatgtgaaatccaccacatttctgaagagcaaaacaaattctgtcatgtaatctctatcttgggtcgtgggtatatctgtccccttagt

SEQ ID NO: 158 - DNA, 442 bp, Homo sapien
  misc_feature (1)...(442): n = A,T,C or G
acccactggtcttggaaacacccatccttaatacgatgatttttctgtcgtgtgaaaatgaanccagcaggctgcccctagtcagtccttccttccagagaaaaagagatttgagaaagtgcctgggtaattcaccattaatttcctcccccaaactctctgagtcttcccttaatatttctggtggttctgaccaaagcaggtcatggtttgttgagcatttgggatcccagtgaagtanatgtttgtagccttgcatacttagcccttcccacgcacaaacggagtggcagagtggtgccaaccctgttttcccagtccacgtagacagattcacagtgcggaattctggaagctgganacagacgggctctttgcagagccgggactctgaganggacatgagggcctctgcctctgtgttcattctctgatgtcctgt

SEQ ID NO: 159 - DNA, 498 bp, Homo sapien
  misc_feature (1)...(498): n = A,T,C or G
acttccaggtaacgttgttgtttccgttgagcctgaactgatgggtgacgttgtaggttctccaacaagaactgaggttgcagagcgggtagggaagagtgctgttccagttgcacctgggctgctgtggactgttgttgattcctcactacggcccaaggttgtggaactggcanaaaggtgtgttgttgganttgagctcgggcggctgtggtaggttgtgggctcttcaacaggggctgctgtggtgccgggangtgaangtgttgtgtcacttgagcttggccagctctggaaagtantanattcttcctgaaggccagcgcttgtggagctggcangggtcantgttgtgtgtaacgaaccagtgctgctgtgggtgggtgtanatcctccacaaagcctgaagttatggtgtcntcaggtaanaatgtggtttcagtgtccctgggcngctgtggaaggttgtanattgtcaccaagggaataagctgtggt

SEQ ID NO: 160 - DNA, 380 bp, Homo sapien
  misc_feature (1)...(380): n = A,T,C or G
acctgcatccagcttccctgccaaactcacaaggagacatcaacctctagacagggaaacagcttcaggatacttccaggagacagagccaccagcagcaaaacaaatattcccatgcctggagcatggcatagaggaagctganaaatgtggggtctgaggaagccatttgagtctggccactagacatctcatcagccacttgtgtgaagagatgccccatgaccccagatgcctctcccacccttacctccatctcacacacttgagctttccactctgtataattctaacatcctggagaaaaatggcagtttgaccgaacctgttcacaacggtagaggctgatttctaacgaaacttgtagaatgaagcctgga

SEQ ID NO: 161 - DNA, 114 bp, Homo sapien
actccacatcccctctgagcaggcggttgtcgttcaaggtgtatttggccttgcctgtcacactgtccactggccccttatccacttggtgcttaatccctcgaaagagcatgt

SEQ ID NO: 162 - DNA, 177 bp, Homo sapien
actttctgaatcgaatcaaatgatacttagtgtagttttaatatcctcatatatatcaaagttttactactctgataattttgtaaaccaggtaaccagaacatccagtcatacagcttttggtgatatataacttggcaataacccagtctggtgatacataaaactactcactgt

SEQ ID NO: 163 - DNA, 137 bp, Homo sapien
  misc_feature (1)...(137): n = A,T,C or G
catttatacagacaggcgtgaagacattcacgacaaaaacgcgaaattctatcccgtgaccanagaaggcagctacggctactcctacatcctggcgtgggtggccttcgcctgcaccttcatcagcggcatgatgt

SEQ ID NO: 164 - DNA, 469 bp, Homo sapien
  misc_feature (1)...(469): n = A,T,C or G
cttatcacaatgaatgttctcctgggcagcgttgtgatctttgccaccttcgtgactttatgcaatgcatcatgctatttcatacctaatgagggagttccaggagattcaaccaggaaatgcatggatctcaaaggaaacaaacacccaataaactcggagtggcagactgacaactgtgagacatgcacttgctacgaaacagaaatttcatgttgcacccttgtttctacacctgtgggttatgacaaagacaactgccaaagaatcttcaagaaggaggactgcaagtatatcgtggtggagaagaaggacccaaaaaagacctgttctgtcagtgaatggataatctaatgtgcttctagtaggcacagggctcccaggccaggcctcattctcctctggcctctaatagtcaatgattgtgtagccatgcctatcagtaaaaagatntttgagcaaacacttt

SEQ ID NO: 165 - DNA, 195 bp, Homo sapien
  misc_feature (1)...(195): n = A,T,C or G
acagttttttatanatatcgacattgccggcacttgtgttcagtttcataaagctggtggatccgctgtcatccactattccttggctagagtaaaaattattcttatagcccatgtccctgcaggccgcccgcccgtagttctcgttccagtcgtcttggcacacagggtgccaggacttcctctgagatgagt

SEQ ID NO: 166 - DNA, 383 bp, Homo sapien
  misc_feature (1)...(383): n = A,T,C or G
acatcttagtagtgtggcacatcagggggccatcagggtcacagtcactcatagcctcgccgaggtcggagtccacaccaccggtgtaggtgtgctcaatcttgggcttggcgcccacctttggagaagggatatgctgcacacacatgtccacaaagcctgtgaactcgccaaagaatttttgcagaccagcctgagcaaggggcggatgttcagcttcagctcctccttcgtcaggtggatgccaacctcgtctanggtccgtgggaagctggtgtccacntcacctacaacctgggcgangatcttataaagaggctccnagataaactccacgaaacttctctgggagctgctagtnggggcctttttggtgaactttc

SEQ ID NO: 167 - DNA, 247 bp, Homo sapien
  misc_feature (1)...(247): n = A,T,C or G
acagagccagaccttggccataaatgaancagagattaagactaaaccccaagtcganattggagcagaaactggagcaagaagtgggcctggggctgaagtagagaccaaggccactgctatanccatacacagagccaactctcaggccaaggcnatggttggggcaganccagagactcaatctgantccaaagtggtggctggaacactggtcatgacanaggcagtgactctgactgangtc

SEQ ID NO: 168 - DNA, 273 bp, Homo sapien
  misc_feature (1)...(273): n = A,T,C or G
acttctaagttttctagaagtggaaggattgtantcatcctgaaaatgggtttacttcaaaatccctcanccttgttcttcacnactgtctatactganagtgtcatgtttccacaaagggctgacacctgagcctgnattttcactcatccctgagaagccctttccagtagggtgggcaattcccaacttccttgccacaagcttcccaggctttctcccctggaaaactccagcttgagtcccagatacactcatgggctgccctgggca

SEQ ID NO: 169 - DNA, 431 bp, Homo sapien
  misc_feature (1)...(431): n = A,T,C or G
acagccttggcttccccaaactccacagtctcagtgcagaaagatcatcttccagcagtcagctcagaccagggtcaaaggatgtgacatcaacagtttctggtttcagaacaggttctactactgtcaaatgaccccccatacttcctcaaaggctgtggtaagttttgcacaggtgagggcagcagaaagggggtanttactgatggacaccatcttctctgtatactccacactgaccttgccatgggcaaaggcccctaccacaaaaacaataggatcactgctgggcaccagctcacgcacatcactgacaaccgggatggaaaaagaantgccaactttcatacatccaactggaaagtgatctgatactggattcttaattaccttcaaaagcttctgggggccatcagctgctcgaacactga

SEQ ID NO: 170 - DNA, 266 bp, Homo sapien
  misc_feature (1)...(266): n = A,T,C or G
acctgtgggctgggctgttatgcctgtgccggctgctgaaagggagttcagaggtggagctcaaggagctctgcaggcattttgccaancctctccanagcanagggagcaacctacactccccgctagaaagacaccagattggagtcctgggagggggagttggggtgggcatttgatgtatacttgtcacctgaatgaangagccagagaggaangagacgaanatganattggccttcaaagctaggggtctggcaggtgga

SEQ ID NO: 171 - DNA, 1248 bp, Homo sapien
  misc_feature (1)...(1248): n = A,T,C or G
ggcagccaaatcataaacggcgaggactgcagcccgcactcgcagccctggcaggcggcactggtcatggaaaacgaattgttctgctcgggcgtcctggtgcatccgcagtgggtgctgtcagccgcacactgtttccagaagtgagtgcagagctcctacaccatcgggctgggcctgcacagtcttgaggccgaccaagagccagggagccagatggtggaggccagcctctccgtacggcacccagagtacaacagacccttgctcgctaacgacctcatgctcatcaagttggacgaatccgtgtccgagtctgacaccatccggagcatcagcattgcttcgcagtgccctaccgcggggaactcttgcctcgtttctggctggggtctgctggcgaacggcagaatgcctaccgtgctgcagtgcgtgaacgtgtcggtggtgtctgaggaggtctgcagtaagctctatgacccgctgtaccaccccagcatgttctgcgccggcggagggcaagaccagaaggactcctgcaacggtgactctggggggcccctgatctgcaacgggtacttgcagggccttgtgtctttcggaaaagccccgtgtggccaagttggcgtgccaggtgtctacaccaacctctgcaaattcactgagtggatagagaaaaccgtccaggccagttaactctggggactgggaacccatgaaattgacccccaaatacatcctgcggaaggaattcaggaatatctgttcccagcccctcctccctcaggcccaggagtccaggcccccagcccctcctccctcaaaccaagggtacagatccccagcccctcctccctcagacccaggagtccagaccccccagcccctcctccctcagacccaggagtccagcccctcctccctcagacccaggagtccagaccccccagcccctcctccctcagacccaggggtccaggcccccaacccctcctccctcagactcagaggtccaagcccccaacccntcattccccagacccagaggtccaggtcccagcccctcntccctcagacccagcggtccaatgccacctagactntccctgtacacagtgcccccttgtggcacgttgacccaaccttaccagttggtttttcatttttngtccctttcccctagatccagaaataaagtttaagagaagngcaaaaaaaaaaaaaaaaaaaaaaaaaaaaaaaaaaaaa

SEQ ID NO: 172 - protein, 159 aa, Homo sapien
  VARIANT (1)...(159): Xaa = Any Amino Acid
MVEASLSVRHPEYNRPLLANDLMLIKLDESVSESDTIRSISIASQCPTAGNSCLVSGWGLLANGRMPTVLQCVNVSVVSEEVCSKLYDPLYHPSMFCAGGGQXQXDSCNGDSGGPLICNGYLQGLVSFGKAPCGQVGVPGVYTNLCKFTEWIEKTVQAS

SEQ ID NO: 173 - DNA, 1265 bp, Homo sapien
  misc_feature (1)...(1265): n = A,T,C or G
ggcagcccgcactcgcagccctggcaggcggcactggtcatggaaaacgaattgttctgctcgggcgtcctggtgcatccgcagtgggtgctgtcagccgcacactgtttccagaactcctacaccatcgggctgggcctgcacagtcttgaggccgaccaagagccagggagccagatggtggaggccagcctctccgtacggcacccagagtacaacagacccttgctcgctaacgacctcatgctcatcaagttggacgaatccgtgtccgagtctgacaccatccggagcatcagcattgcttcgcagtgccctaccgcggggaactcttgcctcgtttctggctggggtctgctggcgaacggtgagctcacgggtgtgtgtctgccctcttcaaggaggtcctctgcccagtcgcgggggctgacccagagctctgcgtcccaggcagaatgcctaccgtgctgcagtgcgtgaacgtgtcggtggtgtctgaggaggtctgcagtaagctctatgacccgctgtaccaccccagcatgttctgcgccggcggagggcaagaccagaaggactcctgcaacggtgactctggggggcccctgatctgcaacgggtacttgcagggccttgtgtctttcggaaaagccccgtgtggccaagttggcgtgccaggtgtctacaccaacctctgcaaattcactgagtggatagagaaaaccgtccaggccagttaactctggggactgggaacccatgaaattgacccccaaatacatcctgcggaaggaattcaggaatatctgttcccagcccctcctccctcaggcccaggagtccaggcccccagcccctcctccctcaaaccaagggtacagatccccagcccctcctccctcagacccaggagtccagaccccccagcccctcctccctcagacccaggagtccagcccctcctccntcagacccaggagtccagaccccccagcccctcctccctcagacccaggggttgaggcccccaacccctcctccttcagagtcagaggtccaagcccccaacccctcgttccccagacccagaggtnnaggtcccagcccctcttccntcagacccagnggtccaatgccacctagattttccctgnacacagtgcccccttgtggnangttgacccaaccttaccagttggtttttcatttttngtccctttcccctagatccagaaataaagtttaagagangngcaaaaaaaaaa

SEQ ID NO: 174 - DNA, 1459 bp, Homo sapien
  misc_feature (1)...(1459): n = A,T,C or G
ggtcagccgcacactgtttccagaagtgagtgcagagctcctacaccatcgggctgggcctgcacagtcttgaggccgaccaagagccagggagccagatggtggaggccagcctctccgtacggcacccagagtacaacagacccttgctcgctaacgacctcatgctcatcaagttggacgaatccgtgtccgagtctgacaccatccggagcatcagcattgcttcgcagtgccctaccgcggggaactcttgcctcgtttctggctggggtctgctggcgaacggtgagctcacgggtgtgtgtctgccctcttcaaggaggtcctctgcccagtcgcgggggctgacccagagctctgcgtcccaggcagaatgcctaccgtgctgcagtgcgtgaacgtgtcggtggtgtctgangaggtctgcantaagctctatgacccgctgtaccaccccancatgttctgcgccggcggagggcaagaccagaaggactcctgcaacgtgagagaggggaaaggggagggcaggcgactcagggaagggtggagaagggggagacagagacacacagggccgcatggcgagatgcagagatggagagacacacagggagacagtgacaactagagagagaaactgagagaaacagagaaataaacacaggaataaagagaagcaaaggaagagagaaacagaaacagacatggggaggcagaaacacacacacatagaaatgcagttgaccttccaacagcatggggcctgagggcggtgacctccacccaatagaaaatcctcttataacttttgactccccaaaaacctgactagaaatagcctactgttgacggggagccttaccaataacataaatagtcgatttatgcatacgttttatgcattcatgatatacctttgttggaattttttgatatttctaagctacacagttcgtctgtgaatttttttaaattgttgcaactctcctaaaatttttctgatgtgtttattgaaaaaatccaagtataagtggacttgtgcattcaaaccagggttgttcaagggtcaactgtgtacccagagggaaacagtgacacagattcatagaggtgaaacacgaagagaaacaggaaaaatcaagactctacaaagaggctgggcagggtggctcatgcctgtaatcccagcactttgggaggcgaggcaggcagatcacttgaggtaaggagttcaagaccagcctggccaaaatggtgaaatcctgtctgtactaaaaatacaaaagttagctggatatggtggcaggcgcctgtaatcccagctacttgggaggctgaggcaggagaattgcttgaatatgggaggcagaggttgaagtgagttgagatcacaccactatactccagctggggcaacagagtaagactctgtctcaaaaaaaaaaaaaaaaaa

SEQ ID NO: 175 - DNA, 1167 bp, Homo sapien
  misc_feature (1)...(1167): n = A,T,C or G
gcgcagccctggcaggcggcactggtcatggaaaacgaattgttctgctcgggcgtcctggtgcatccgcagtgggtgctgtcagccgcacactgtttccagaactcctacaccatcgggctgggcctgcacagtcttgaggccgaccaagagccagggagccagatggtggaggccagcctctccgtacggcacccagagtacaacagactcttgctcgctaacgacctcatgctcatcaagttggacgaatccgtgtccgagtctgacaccatccggagcatcagcattgcttcgcagtgccctaccgcggggaactcttgcctcgtntctggctggggtctgctggcgaacggcagaatgcctaccgtgctgcactgcgtgaacgtgtcggtggtgtctgaggangtctgcagtaagctctatgacccgctgtaccaccccagcatgttctgcgccggcggagggcaagaccagaaggactcctgcaacggtgactctggggggcccctgatctgcaacgggtacttgcagggccttgtgtctttcggaaaagccccgtgtggccaacttggcgtgccaggtgtctacaccaacctctgcaaattcactgagtggatagagaaaaccgtccagnccagttaactctggggactgggaacccatgaaattgacccccaaatacatcctgcggaangaattcaggaatatctgttcccagcccctcctccctcaggcccaggagtccaggcccccagcccctcctccctcaaaccaagggtacagatccccagcccctcctccctcagacccaggagtccagaccccccagcccctcntccntcagacccaggagtccagcccctcctccntcagacgcaggagtccagaccccccagcccntcntccgtcagacccaggggtgcaggcccccaacccctcntccntcagagtcagaggtccaagcccccaacccctcgttccccagacccagaggtncaggtcccagcccctcctccctcagacccagcggtccaatgccacctagantntccctgtacacagtgcccccttgtggcangttgacccaaccttaccagttggtttttcattttttgtccctttcccctagatccagaaataaagtntaagagaagcgcaaaaaaa

SEQ ID NO: 176 - protein, 205 aa, Homo sapien
  VARIANT (1)...(205): Xaa = Any Amino Acid
MENELFCSGVLVHPQWVLSAAHCFQNSYTIGLGLHSLEADQEPGSQMVEASLSVRHPEYNRLLLANDLMLIKLDESVSESDTIRSISIASQCPTAGNSCLVSGWGLLANGRMPTVLHCVNVSVVSEXVCSKLYDPLYHPSMFCAGGGQDQKDSCNGDSGGPLICNGYLQGLVSFGKAPCGQLGVPGVYTNLCKFTEWIEKTVQXS

SEQ ID NO: 177 - DNA, 1119 bp, Homo sapien
gcgcactcgcagccctggcaggcggcactggtcatggaaaacgaattgttctgctcgggcgtcctggtgcatccgcagtgggtgctgtcagccgcacactgtttccagaactcctacaccatcgggctgggcctgcacagtcttgaggccgaccaagagccagggagccagatggtggaggccagcctctccgtacggcacccagagtacaacagacccttgctcgctaacgacctcatgctcatcaagttggacgaatccgtgtccgagtctgacaccatccggagcatcagcattgcttcgcagtgccctaccgcggggaactcttgcctcgtttctggctggggtctgctggcgaacgatgctgtgattgccatccagtcccagactgtgggaggctgggagtgtgagaagctttcccaaccctggcagggttgtaccatttcggcaacttccagtgcaaggacgtcctgctgcatcctcactgggtgctcactactgctcactgcatcacccggaacactgtgatcaactagccagcaccatagttctccgaagtcagactatcatgattactgtgttgactgtgctgtctattgtactaaccatgccgatgtttaggtgaaattagcgtcacttggcctcaaccatcttggtatccagttatcctcactgaattgagatttcctgcttcagtgtcagccattcccacataatttctgacctacagaggtgagggatcatatagctcttcaaggatgctggtactcccctcacaaattcatttctcctgttgtagtgaaaggtgcgccctctggagcctcccagggtgggtgtgcaggtcacaatgatgaatgtatgatcgtgttcccattacccaaagcctttaaatccctcatgctcagtacaccagggcaggtctagcatttcttcatttagtgtatgctgtccattcatgcaaccacctcaggactcctggattctctgcctagttgagctcctgcatgctgcctccttggggaggtgagggagagggcccatggttcaatgggatctgtgcagttgtaacacattaggtgcttaataaacagaagctgtgatgttaaaaaaaaaaaaaaa

SEQ ID NO: 178 - protein, 164 aa, Homo sapien
  VARIANT (1)...(164): Xaa = Any Amino Acid
MENELFCSGVLVHPQWVLSAAHCFQNSYTIGLGLHSLEADQEPGSQMVEASLSVRHPEYNRPLLANDLMLIKLDESVSESDTIRSISIASQCPTAGNSCLVSGWGLLANDAVIAIQSXTVGGWECEKLSQPWQGCTISATSSARTSCCILTGCSLLLTASPGTL

SEQ ID NO: 179 - DNA, 250 bp, Homo sapien
ctggagtgccttggtgtttcaagcccctgcaggaagcagaatgcaccttctgaggcacctccagctgcccccggccgggggatgcgaggctcggagcacccttgcccggctgtgattgctgccaggcactgttcatctcagcttttctgtccctttgctcccggcaagcgcttctgctgaaagttcatatctggagcctgatgtcttaacgaataaaggtcccatgctccacccgaaaaaaaaaaaaaaa

SEQ ID NO: 180 - DNA, 202 bp, Homo sapien
actagtccagtgtggtggaattccattgtgttgggcccaacacaatggctacctttaacatcacccagaccccgcccctgcccgtgccccacgctgctgctaacgacagtatgatgcttactctgctactcggaaactatttttatgtaattaatgtatgctttcttgtttataaatgcctgatttaaaaaaaaaaaaaaaa

SEQ ID NO: 181 - DNA, 558 bp, Homo sapien
  misc_feature (1)...(558): n = A,T,C or G
tccytttgktnaggtttkkgagacamccckagacctwaanctgtgtcacagacttcynggaatgtttaggcagtgctagtaatttcytcgtaatgattctgttattactttcctnattctttattcctctttcttctgaagattaatgaagttgaaaattgaggtggataaatacaaaaaggtagtgtgatagtataagtatctaagtgcagatgaaagtgtgttatatatatccattcaaaattatgcaagttagtaattactcagggttaactaaattactttaatatgctgttgaacctactctgttccttggctagaaaaaattataaacaggactttgttagtttgggaagccaaattgataatattctatgttctaaaagttgggctatacataaattattaagaaatatggawttttattcccaggaatatggkgttcattttatgaatattacscrggatagawgtwtgagtaaaaycagttttggtwaataygtwaatatgtcmtaaataaacaakgctttgacttatttccaaaaaaaaaaaaaaaaa

SEQ ID NO: 182 - DNA, 479 bp, Homo sapien
  misc_feature (1)...(479): n = A,T,C or G
acagggwttkgrggatgctaagsccccrgarwtygtttgatccaaccctggcttwttttcagaggggaaaatggggcctagaagttacagmscatytagytggtgcgmtggcacccctggcstcacacagastcccgagtagctgggactacaggcacacagtcactgaagcaggccctgttwgcaattcacgttgccacctccaacttaaacattcttcatatgtgatgtccttagtcactaaggttaaactttcccacccagaaaaggcaacttagataaaatcttagagtactttcatactmttctaagtcctcttccagcctcactkkgagtcctmcytgggggttgataggaantntctcttggctttctcaataaartctctatycatctcatgtttaatttggtacgcataraawtgstgaraaaattaaaatgttctggttymactttaaaaaraaaaaaaaaaaaaaaaa

SEQ ID NO: 183 - DNA, 384 bp, Homo sapien
aggcgggagcagaagctaaagccaaagcccaagaagagtggcagtgccagcactggtgccagtaccagtaccaataacagtgccagtgccagtgccagcaccagtggtggcttcagtgctggtgccagcctgaccgccactctcacatttgggctcttcgctggccttggtggagctggtgccagcaccagtggcagctctggtgcctgtggtttctcctacaagtgagattttagatattgttaatcctgccagtctttctcttcaagccagggtgcatcctcagaaacctactcaacacagcactctaggcagccactatcaatcaattgaagttgacactctgcattaratctatttgccatttcaaaaaaaaaaaaaaaa

SEQ ID NO: 184 - DNA, 496 bp, Homo sapien
  misc_feature (1)...(496): n = A,T,C or G
accgaattgggaccgctggcttataagcgatcatgtyyntccrgtatkacctcaacgagcagggagatcgagtctatacgctgaagaaatttgacccgatgggacaacagacctgctcagcccatcctgctcggttctccccagatgacaaatactctsgacaccgaatcaccatcaagaaacgcttcaaggtgctcatgacccagcaaccgcgccctgtcctctgagggtcccttaaactgatgtcttttctgccacctgttacccctcggagactccgtaaccaaactcttcggactgtgagccctgatgcctttttgccagccatactctttggcatccagtctctcgtggcgattgattatgcttgtgtgaggcaatcatggtggcatcacccataaagggaacacatttgacttttttttctcatattttaaattactacmagawtattwmagawwaaatgawttgaaaaactsttaaaaaaaaaaaaaaa

SEQ ID NO: 185 - DNA, 384 bp, Homo sapien
gctggtagcctatggcgkggcccacggaggggctcctgaggccacggracagtgacttcccaagtatcytgcgcsgcgtcttctaccgtccctacctgcagatcttcgggcagattccccaggaggacatggacgtggccctcatggagcacagcaactgytcgtcggagcccggcttctgggcacaccctcctggggcccaggcgggcacctgcgtctcccagtatgccaactggctggtggtgctgctcctcgtcatcttcctgctcgtggccaacatcctgctggtcaacttgctcattgccatgttcagttacacattcggcaaagtacagggcaacagcgatctctactgggaaggcgcagcgttaccgcctcatccgg

SEQ ID NO: 186 - DNA, 577 bp, Homo sapien
  misc_feature (1)...(577): n = A,T,C or G
gagttagctcctccacaaccttgatgaggtcgtctgcagtggcctctcgcttcataccgctnccatcgtcatactgtaggtttgccaccacytcctggcatcttggggcggcntaatattccaggaaactctcaatcaagtcaccgtcgatgaaacctgtgggctggttctgtcttccgctcggtgtgaaaggatctcccagaaggagtgctcgatcttccccacacttttgatgactttattgagtcgattctgcatgtccagcaggaggttgtaccagctctctgacagtgaggtcaccagccctatcatgccgttgamcgtgccgaagarcaccgagccttgtgtgggggkkgaagtctcacccagattctgcattaccagagagccgtggcaaaagacattgacaaactcgcccaggtggaaaaagamcamctcctggargtgctngccgctcctcgtcmgttggtggcagcgctwtccttttgacacacaaacaagttaaaggcattttcagcccccagaaanttgtcatcatccaagatntcgcacagcactnatccagttgggattaaat

SEQ ID NO: 187 - DNA, 534 bp, Homo sapien
  misc_feature (1)...(534): n = A,T,C or G
aacatcttcctgtataatgctgtgtaatatcgatccgatnttgtctgstgagaatycatwactkggaaaagmaacattaaagcctggacactggtattaaaattcacaatatgcaacactttaaacagtgtgtcaatctgctcccyynactttgtcatcaccagtctgggaakaagggtatgccctattcacacctgttaaaagggcgctaagcatttttgattcaacatctttttttttgacacaagtccgaaaaaagcaaaagtaaacagttatyaatttgttagccaattcactttcttcatgggacagagccatytgatttaaaaagcaaattgcataatattgagcttygggagctgatatttgagcggaagagtagcctttctacttcaccagacacaactccctttcatattgggatgttnacnaaagtwatgtctctwacagatgggatgcttttgtggcaattctgttctgaggatctcccagtttatttaccacttgcacaagaaggcgttttcttcctcaggc

SEQ ID NO: 188 - DNA, 761 bp, Homo sapien
  misc_feature (1)...(761): n = A,T,C or G
agaaaccagtatctctnaaaacaacctctcataccttgtggacctaattttgtgtgcgtgtgtgtgtgcgcgcatattatatagacaggcacatcttttttacttttgtaaaagcttatgcctctttggtatctatatctgtgaaagttttaatgatctgccataatgtcttggggacctttgtcttctgtgtaaatggtactagagaaaacacctatnttatgagtcaatctagttngttttattcgacatgaaggaaatttccagatnacaacactnacaaactctccctkgackargggggacaaagaaaagcaaaactgamcataaraaacaatwacctggtgagaarttgcataaacagaaatwrggtagtatattgaarnacagcatcattaaarmgttwtkttwttctcccttgcaaaaaacatgtacngacttcccgttgagtaatgccaagttgttttttttatnataaaacttgcccttcattacatgtttnaaagtggtgtggtgggccaaaatattgaaatgatggaactgactgataaagctgtacaaataagcagtgtgcctaacaagcaacacagtaatgttgacatgcttaattcacaaatgctaatttcattataaatgtttgctaaaatacactttgaactatttttctgtnttcccagagctgagatnttagattttatgtagtatnaagtgaaaaantacgaaaataataacattgaagaaaaananaaaaaanaaaaaaa

SEQ ID NO: 189 - DNA, 482 bp, Homo sapien
  misc_feature (1)...(482): n = A,T,C or G
tttttttttttttgccgatnctactattttattgcaggangtgggggtgtatgcaccgcacaccggggctatnagaagcaagaaggaaggagggagggcacagccccttgctgagcaacaaagccgcctgctgccttctctgtctgtctcctggtgcaggcacatggggagaccttccccaaggcaggggccaccagtccaggggtgggaatacagggggtgggangtgtgcataagaagtgataggcacaggccacccggtacagacccctcggctcctgacaggtngatttcgaccaggtcattgtgccctgcccaggcacagcgtanatctggaaaagacagaatgctttccttttcaaatttggctngtcatngaangggcanttttccaanttnggctnggtcttggtacncttggttcggcccagctccncgtccaaaaantattcacccnnctccnaattgcttgcnggnccccc

SEQ ID NO: 190 - DNA, 471 bp, Homo sapien
  misc_feature (1)...(471): n = A,T,C or G
ttttttttttttttaaaacagtttttcacaacaaaatttattagaagaatagtggttttgaaaactctcgcatccagtgagaactaccatacaccacattacagctnggaatgtnctccaaatgtctggtcaaatgatacaatggaaccattcaatcttacacatgcacgaaagaacaagcgcttttgacatacaatgcacaaaaaaaaaaggggggggggaccacatggattaaaattttaagtactcatcacatacattaagacacagttctagtccagtcnaaaatcagaactgcnttgaaaaatttcatgtatgcaatccaaccaaagaacttnattggtgatcatgantnctctactacatcnaccttgatcattgccaggaacnaaaagttnaaancacncngtacaaaaanaatctgtaattnanttcaacctccgtacngaaaaatnttnnttatacactccc

SEQ ID NO: 191 - DNA, 402 bp, Homo sapien
  misc_feature (1)...(402): n = A,T,C or G
gagggattgaaggtctgttctastgtcggmctgttcagccaccaactctaacaagttgctgtcttccactcactgtctgtaagctttttaacccagacwgtatcttcataaatagaacaaattcttcaccagtcacatcttctaggacctttttggattcagttagtataagctcttccacttcctttgttaagacttcatctggtaaagtcttaagttttgtagaaaggaattyaattgctcgttctctaacaatgtcctctccttgaagtatttggctgaacaacccacctaaagtccctttgtgcatccattttaaatatacttaatagggcattgktncactaggttaaattctgcaagagtcatctgtctgcaaaagttgcgttagtatatctgcca

SEQ ID NO: 192 - DNA, 601 bp, Homo sapien
  misc_feature (1)...(601): n = A,T,C or G
gagctcggatccaataatctttgtctgagggcagcacacatatncagtgccatggnaactggtctaccccacatgggagcagcatgccgtagntatataaggtcattccctgagtcagacatgcytytttgaytaccgtgtgccaagtgctggtgattctyaacacacytccatcccgytcttttgtggaaaaactggcacttktctggaactagcargacatcacttacaaattcacccacgagacacttgaaaggtgtaacaaagcgaytcttgcattgctttttgtccctccggcaccagttgtcaatactaacccgctggtttgcctccatcacatttgtgatctgtagctctggatacatctcctgacagtactgaagaacttcttcttttgtttcaaaagcarctcttggtgcctgttggatcaggttcccatttcccagtcygaatgttcacatggcatatttwacttcccacaaaacattgcgatttgaggctcagcaacagcaaatcctgttccggcattggctgcaagagcctcgatgtagccggccagcgccaaggcaggcgccgtgagccccaccagcagcagaagcag

SEQ ID NO: 193 - DNA, 608 bp, Homo sapien
  misc_feature (1)...(608): n = A,T,C or G
atacagcccanatcccaccacgaagatgcgcttgttgactgagaacctgatgcggtcactggtcccgctgtagccccagcgactctccacctgctggaagcggttgatgctgcactcyttcccaacgcaggcagmagcgggsccggtcaatgaactccaytcgtggcttggggtkgacggtkaagtgcaggaagaggctgaccacctcgcggtccaccaggatgcccgactgtgcgggacctgcagcgaaactcctcgatggtcatgagcgggaagcgaatgaggcccagggccttgcccagaaccttccgcctgttctctggcgtcacctgcagctgctgccgctgacactcggcctcggaccagcggacaaacggcrttgaacagccgcacctcacggatgcccagtgtgtcgcgctccaggammgscaccagcgtgtccaggtcaatgtcggtgaagccctccgcgggtratggcgtctgcagtgtttttgtcgatgttctccaggcacaggctggccagctgcggttcatcgaagagtcgcgcctgcgtgagcagcatgaaggcgttgtcggctcgcagttcttcttcaggaactccacgcaat

SEQ ID NO: 194 - DNA, 392 bp, Homo sapien
  misc_feature (1)...(392): n = A,T,C or G
gaacggctggaccttgcctcgcattgtgcttgctggcagggaataccttggcaagcagytccagtccgagcagccccagaccgctgccgcccgaagctaagcctgcctctggccttcccctccgcctcaatgcagaaccagtagtgggagcactgtgtttagagttaagagtgaacactgtttgattttacttgggaatttcctctgttatatagcttttcccaatgctaatttccaaacaacaacaacaaaataacatgtttgcctgttaagttgtataaaagtaggtgattctgtatttaaagaaaatattactgttacatatactgcttgcaatttctgtatttattgktnctstggaaataaatatagttattaaaggttgtcantcc

SEQ ID NO: 195 - DNA, 502 bp, Homo sapien
  misc_feature (1)...(502): n = A,T,C or G
ccsttkgaggggtkaggkyccagttyccgagtggaagaaacaggccaggagaagtgcgtgccgagctgaggcagatgttcccacagtgacccccagagccstgggstatagtytctgacccctcncaaggaaagaccacsttctggggacatgggctggagggcaggacctagaggcaccaagggaaggccccattccggggstgttccccgaggaggaagggaaggggctctgtgtgccccccasgaggaagaggccctgagtcctgggatcagacaccccttcacgtgtatccccacacaaatgcaagctcaccaaggtcccctctcagtccccttccstacaccctgamcggccactgscscacacccacccagagcacgccacccgccatggggartgtgctcaaggartcgcngggcarcgtggacatctngtcccagaagggggcagaatctccaataganggactgarcmsttgctnanaaaaaaaaanaaaaaa

SEQ ID NO: 196 - DNA, 665 bp, Homo sapien
  misc_feature (1)...(665): n = A,T,C or G
ggttacttggtttcattgccaccacttagtggatgtcatttagaaccattttgtctgctccctctggaagccttgcgcagagcggactttgtaattgttggagaataactgctgaattttwagctgtttkgagttgattsgcaccactgcacccacaacttcaatatgaaaacyawttgaactwatttattatcttgtgaaaagtataacaatgaaaattttgttcatactgtattkatcaagtatgatgaaaagcaawagatatatattcttttattatgttaaattatgattgccattattaatcggcaaaatgtggagtgtatgttcttttcacagtaatatatgccttttgtaacttcacttggttattttattgtaaatgarttacaaaattcttaatttaagaraatggtatgtwatatttatttcattaatttctttcctkgtttacgtwaattttgaaaagawtgcatgatttcttgacagaaatcgatcttgatgctgtggaagtagtttgacccacatccctatgagtttttcttagaatgtataaaggttgtagcccatcnaacttcaaagaaaaaaatgaccacatactttgcaatcaggctgaaatgtggcatgctnttctaattccaactttataaactagcaaanaagtg

SEQ ID NO: 197 - DNA, 492 bp, Homo sapien
  misc_feature (1)...(492): n = A,T,C or G
ttttntttttttttttttgcaggaaggattccatttattgtggatgcattttcacaatatatgtttattggagcgatccattatcagtgaaaagtatcaagtgtttataanatttttaggaaggcagattcacagaacatgctngtcngcttgcagttttacctcgtanagatnacagagaattatagtcnaaccagtaaacnaggaatttacttttcaaaagattaaatccaaactgaacaaaattctaccctgaaacttactccatccaaatattggaataanagtcagcagtgatacattctcttctgaactttagattttctagaaaaatatgtaatagtgatcaggaagagctcttgttcaaaagtacaacnaagcaatgttcccttaccataggccttaattcaaactttgatccatttcactcccatcacgggagtcaatgctacctgggacacttgtattttgttcatnctgancntggcttaa

SEQ ID NO: 198 - DNA, 478 bp, Homo sapien
  misc_feature (1)...(478): n = A,T,C or G
tttnttttgnatttcantctgtannaantattttcattatgtttattanaaaaatatnaatgtntccacnacaaatcatnttacntnagtaagaggccanctacattgtacaacatacactgagtatattttgaaaaggacaagtttaaagtanacncatattgccgancatancacatttatacatggcttgattgatatttagcacagcanaaactgagtgagttaccagaaanaaatnatatatgtcaatcngatttaagatacaaaacagatcctatggtacatancatcntgtaggagttgtggctttatgtttactgaaagtcaatgcagttcctgtacaaagagatggccgtaagcattctagtacctctactccatggttaagaatcgtacacttatgtttacatatgtncagggtaagaattgtgttaagtnaanttatggagaggtccangagaaaaatttgatncaa

SEQ ID NO: 199 - DNA, 482 bp, Homo sapien
  misc_feature (1)...(482): n = A,T,C or G
agtgacttgtcctccaacaaaaccccttgatcaagtttgtggcactgacaatcagacctatgctagttcctgtcatctattcgctactaaatgcagactggaggggaccaaaaaggggcatcaactccagctggattattttggagcctgcaaatctattcctacttgtacggactttgaagtgattcagtttcctctacggatgagagactggctcaagaatatcctcatgcagctttatgaagccnactctgaacacgctggttatctnagatgagaancagagaaataaagtcnagaaaatttacctggangaaaagaggctttnggctggggaccatcccattgaaccttctcttaanggactttaagaanaaactaccacatgtntgtngtatcctggtgccnggccgtttantgaacntngacnncacccttntggaatanantcttgacngcntcctgaacttgctcctctgcga

SEQ ID NO: 200 - DNA, 270 bp, Homo sapien
  misc_feature (1)...(270): n = A,T,C or G
cggccgcaagtgcaactccagctggggccgtgcggacgaagattctgccagcagttggtccgactgcgacgacggcggcggcgacagtcgcaggtgcagcgcgggcgcctggggtcttgcaaggctgagctgacgccgcagaggtcgtgtcacgtcccacgaccttgacgccgtcggggacagccggaacagagcccggtgaangcgggaggcctcggggagcccctcgggaagggcggcccgagagatacgcaggtgcaggtggccgcc

SEQ ID NO: 201 - DNA, 419 bp, Homo sapien
  misc_feature (1)...(419): n = A,T,C or G
ttttttttttttttggaatctactgcgagcacagcaggtcagcaacaagtttattttgcagctagcaaggtaacagggtagggcatggttacatgttcaggtcaacttcctttgtcgtggttgattggtttgtctttatgggggcggggtggggtaggggaaancgaagcanaantaacatggagtgggtgcaccctccctgtagaacctggttacnaaagcttggggcagttcacctggtctgtgaccgtcattttcttgacatcaatgttattagaagtcaggatatcttttagagagtccactgtntctggagggagattagggtttcttgccaanatccaancaaaatccacntgaaaaagttggatgatncangtacngaataccganggcatanttctcatantcggtggcca

SEQ ID NO: 202 - DNA, 509 bp, Homo sapien
  misc_feature (1)...(509): n = A,T,C or G
tttntttttttttttttttttttttttttttttttttttttttttttttttttttttttttggcacttaatccatttttatttcaaaatgtctacaaantttnaatncnccattatacnggtnattttncaaaatctaaannttattcaaatntnagccaaantccttacncaaatnnaatacncncaaaaatcaaaaatatacntntctttcagcaaacttngttacataaattaaaaaaatatatacggctggtgttttcaaagtacaattatcttaacactgcaaacatntttnnaaggaactaaaataaaaaaaaacactnccgcaaaggttaaagggaacaacaaattcnttttacaacancnncnattataaaaatcatatctcaaatcttaggggaatatatacttcacacngggatcttaacttttactncactttgtttatttttttanaaccattgtnttgggcccaacacaatggnaatnccnccncnctggactagt

SEQ ID NO: 203 - DNA, 583 bp, Homo sapien
  misc_feature (1)...(583): n = A,T,C or G
ttttttttttttttttttgacccccctcttataaaaaacaagttaccattttattttacttacacatatttattttataattggtattagatattcaaaaggcagcttttaaaatcaaactaaatggaaactgccttagatacataattcttaggaattagcttaaaatctgcctaaagtgaaaatcttctctagctcttttgactgtaaatttttgactcttgtaaaacatccaaattcatttttcttgtctttaaaattatctaatctttccattttttccctattccaagtcaatttgcttctctagcctcatttcctagctcttatctactattagtaagtggcttttttcctaaaagggaaaacaggaagaganaatggcacacaaaacaaacattttatattcatatttctacctacgttaataaaatagcattttgtgaagccagctcaaaagaaggcttagatccttttatgtccattttagtcactaaacgatatcnaaagtgccagaatgcaaaaggtttgtgaacatttattcaaaagctaatataagatatttcacatactcatctttctg

SEQ ID NO: 204 - DNA, 589 bp, Homo sapien
  misc_feature (1)...(589): n = A,T,C or G
ttttttttntttttttttttttttttnctcttctttttttttganaatgaggatcgagtttttcactctctagatagggcatgaagaaaactcatctttccagctttaaaataacaatcaaatctcttatgctatatcatattttaagttaaactaatgagtcactggcttatcttctcctgaaggaaatctgttcattcttctcattcatatagttatatcaagtactaccttgcatattgagaggtttttcttctctatttacacatatatttccatgtgaatttgtatcaaacctttattttcatgcaaactagaaaataatgtnttcttttgcataagagaagagaacaatatnagcattacaaaactgctcaaattgtttgttaagnttatccattataattagttnggcaggagctaatacaaatcacatttacngacnagcaataataaaactgaagtaccagttaaatatccaaaataattaaaggaacatttttagcctgggtataattagctaattcactttacaagcatttattnagaatgaattcacatgttattattccntagcccaacacaatgg

SEQ ID NO: 205 - DNA, 545 bp, Homo sapien
  misc_feature (1)...(545): n = A,T,C or G
tttttnttttttttttcagtaataatcagaacaatatttatttttatatttaaaattcatagaaaagtgccttacatttaataaaagtttgtttctcaaagtgatcagaggaattagatatngtcttgaacaccaatattaatttgaggaaaatacaccaaaatacattaagtaaattatttaagatcatagagcttgtaagtgaaaagataaaatttgacctcagaaactctgagcattaaaaatccactattagcaaataaattactatggacttcttgctttaattttgtgatgaatatggggtgtcactggtaaaccaacacattctgaaggatacattacttagtgatagattcttatgtactttgctanatnacgtggatatgagttgacaagtttctctttcttcaatcttttaaggggcngangaaatgaggaagaaaagaaaaggattacgcatactgttctttctatnggaaggattagatatgtttcctttgccaatattaaaaaaataataatgtttactactagtgaaaccc

SEQ ID NO: 206 - DNA, 487 bp, Homo sapien
  misc_feature (1)...(487): n = A,T,C or G
ttttttttttttttttagtcaagtttctnatttttattataattaaagtcttggtcatttcatttattagctctgcaacttacatatttaaattaaagaaacgttnttagacaactgtnacaatttataaatgtaaggtgccattattgagtanatatattcctccaagagtggatgtgtcccttctcccaccaactaatgaancagcaacattagtttaattttattagtagatnatacactgctgcaaacgctaattctcttctccatccccatgtngatattgtgtatatgtgtgagttggtnagaatgcatcancaatctnacaatcaacagcaagatgaagctaggcntgggctttcggtgaaaatagactgtgtctgtctgaatcaaatgatctgacctatcctcggtggcaagaactcttcgaaccgcttcctcaaaggcngctgccacatttgtggcntctnttgcacttgtttcaaaa

SEQ ID NO: 207 - DNA, 332 bp, Homo sapien
  misc_feature (1)...(332): n = A,T,C or G
tgaattggctaaaagactgcatttttanaactagcaactcttatttctttcctttaaaaatacatagcattaaatcccaaatcctatttaaagacctgacagcttgagaaggtcactactgcatttataggaccttctggtggttctgctgttacntttgaantctgacaatccttganaatctttgcatgcagaggaggtaaaaggtattggattttcacagaggaanaacacagcgcagaaatgaaggggccaggcttactgagcttgtccactggagggctcatgggtgggacatggaaaagaaggcagcctaggccctggggagccca

SEQ ID NO: 208 - DNA, 524 bp, Homo sapien
  misc_feature (1)...(524): n = A,T,C or G
agggcgtggtgcggagggcgttactgttttgtctcagtaacaataaatacaaaaagactggttgtgttccggccccatccaaccacgaagttgatttctcttgtgtgcagagtgactgattttaaaggacatggagcttgtcacaatgtcacaatgtcacagtgtgaagggcacactcactcccgcgtgattcacatttagcaaccaacaatagctcatgagtccatacttgtaaatacttttggcagaatacttnttgaaacttgcagatgataactaagatccaagatatttcccaaagtaaatagaagtgggtcataatattaattacctgttcacatcagcttccatttacaagtcatgagcccagacactgacatcaaactaagcccacttagactcctcaccaccagtctgtcctgtcatcagacaggaggctgtcaccttgaccaaattctcaccagtcaatcatctatccaaaaaccattacctgatccacttccggtaatgcaccaccttggtga

SEQ ID NO: 209 - DNA, 159 bp, Homo sapien
gggtgaggaaatccagagttgccatggagaaaattccagtgtcagcattcttgctccttgtggccctctcctacactctggccagagataccacagtcaaacctggagccaaaaaggacacaaaggactctcgacccaaactgccccagaccctctcca

SEQ ID NO: 210 - DNA, 256 bp, Homo sapien
  misc_feature (1)...(256): n = A,T,C or G
actccctggcagacaaaggcagaggagagagctctgttagttctgtgttgttgaactgccactgaatttctttccacttggactattacatgccanttgagggactaatggaaaaacgtatggggagattttanccaatttangtntgtaaatggggagactggggcaggcgggagagatttgcagggtgnaaatggganggctggtttgttanatgaacagggacataggaggtaggcaccaggatgctaaatca

SEQ ID NO: 211 - DNA, 264 bp, Homo sapien
  misc_feature (1)...(264): n = A,T,C or G
acattgtttttttgagataaagcattgagagagctctccttaacgtgacacaatggaaggactggaacacatacccacatctttgttctgagggataattttctgataaagtcttgctgtatattcaagcacatatgttatatattattcagttccatgtttatagcctagttaaggagaggggagatacattcngaaagaggactgaaagaaatactcaagtnggaaaacagaaaaagaaaaaaaggagcaaatgagaagcct

SEQ ID NO: 212 - DNA, 328 bp, Homo sapien
  misc_feature (1)...(328): n = A,T,C or G
acccaaaaatccaatgctgaatatttggcttcattattcccanattctttgattgtcaaaggatttaatgttgtctcagcttgggcacttcagttaggacctaaggatgccagccggcaggtttatatatgcagcaacaatattcaagcgcgacaacaggttattgaacttgcccgccagttnaatttcattcccattgacttgggatccttatcatcagccagagagattgaaaatttacccctacnactctttactctctgganagggccagtggtggtagctataagcttggccacatttttttttcctttattcctttgtcaga

SEQ ID NO: 213 - DNA, 250 bp, Homo sapien
  misc_feature (1)...(250): n = A,T,C or G
acttatgagcagagcgacatatccnagtgtagactgaataaaactgaattctctccagtttaaagcattgctcactgaagggatagaagtgactgccaggagggaaagtaagccaaggctcattatgccaaagganatatacatttcaattctccaaacttcttcctcattccaagagttttcaatatttgcatgaacctgctgataanccatgttaanaaacaaatatctctctnaccttctcatcggt

SEQ ID NO: 214 - DNA, 444 bp, Homo sapien
  misc_feature (1)...(444): n = A,T,C or G
acccagaatccaatgctgaatatttggcttcattattcccagattctttgattgtcaaaggatttaatgttgtctcagcttgggcacttcagttaggacctaaggatgccagccggcaggtttatatatgcagcaacaatattcaagcgcgacaacaggttattgaacttgcccgccagttgaatttcattcccattgacttgggatccttatcatcagccanagagattgaaaatttacccctacgactctttactctctggagagggccagtggtggtagctataagcttggccacatttttttttcctttattcctttgtcagagatgcgattcatccatatgctanaaaccaacagagtgacttttacaaaattcctataganattgtgaataaaaccttacctatagttgccattactttgctctccctaatatacctc

SEQ ID NO: 215 - DNA, 366 bp, Homo sapien
  misc_feature (1)...(366): n = A,T,C or G
acttatgagcagagcgacatatccaagtgtanactgaataaaactgaattctctccagtttaaagcattgctcactgaagggatagaagtgactgccaggagggaaagtaagccaaggctcattatgccaaagganatatacatttcaattctccaaacttcttcctcattccaagagttttcaatatttgcatgaacctgctgataagccatgttgagaaacaaatatctctctgaccttctcatcggtaagcagaggctgtaggcaacatggaccatagcgaanaaaaaacttagtaatccaagctgttttctacactgtaaccaggtttccaaccaaggtggaaatctcctatacttggtgcc

SEQ ID NO: 216 - DNA, 260 bp, Homo sapien
  misc_feature (1)...(260): n = A,T,C or G
ctgtataaacagaactccactgcangagggagggccgggccaggagaatctccgcttgtccaagacaggggcctaaggagggtctccacactgctnntaagggctnttncatttttttattaataaaaagtnnaaaaggcctcttctcaacttttttcccttnggctggaaaatttaaaaatcaaaaatttcctnaagttntcaagctatcatatatactntatcctgaaaaagcaacataattcttccttccctccttt

SEQ ID NO: 217 - DNA, 262 bp, Homo sapien
  misc_feature (1)...(262): n = A,T,C or G
acctacgtgggtaagtttanaaatgttataatttcaggaanaggaacgcatataattgtatcttgcctataattttctattttaataaggaaatagcaaattggggtggggggaatgtagggcattctacagtttgagcaaaatgcaattaaatgtggaaggacagcactgaaaaattttatgaataatctgtatgattatatgtctctagagtagatttataattagccacttaccctaatatccttcatgcttgtaaagt

SEQ ID NO: 218 - DNA, 205 bp, Homo sapien
  misc_feature (1)...(205): n = A,T,C or G
accaaggtggtgcattaccggaantggatcaangacaccatcgtggccaacccctgagcacccctatcaactcccttttgtagtaaacttggaaccttggaaatgaccaggccaagactcaggcctccccagttctactgacctttgtccttangtntnangtccagggttgctaggaaaanaaatcagcagacacaggtgtaaa

SEQ ID NO: 219 - DNA, 114 bp, Homo sapien
tactgttttgtctcagtaacaataaatacaaaaagactggttgtgttccggccccatccaaccacgaagttgatttctcttgtgtgcagagtgactgattttaaaggacatgga

SEQ ID NO: 220 - DNA, 93 bp, Homo sapien
actagccagcacaaaaggcagggtagcctgaattgctttctgctctttacatttcttttaaaataagcatttagtgctcagtccctactgagt

SEQ ID NO: 221 - DNA, 167 bp, Homo sapien
  misc_feature (1)...(167): n = A,T,C or G
actangtgcaggtgcgcacaaatatttgtcgatattcccttcatcttggattccatgaggtcttttgcccagcctgtggctctactgtagtaagtttctgctgatgaggagccagnatgccccccactaccttccctgacgctccccanaaatcacccaacctctgt

SEQ ID NO: 222 - DNA, 351 bp, Homo sapien
agggcgtggtgcggagggcggtactgacctcattagtaggaggatgcattctggcaccccgttcttcacctgtcccccaatccttaaaaggccatactgcataaagtcaacaacagataaatgtttgctgaattaaaggatggatgaaaaaaattaataatgaatttttgcataatccaattttctcttttatatttctagaagaagtttctttgagcctattagatcccgggaatcttttaggtgagcatgattagagagcttgtaggttgcttttacatatatctggcatatttgagtctcgtatcaaaacaatagattggtaaaggtggtattattgtattgataagt

SEQ ID NO: 223 - DNA, 383 bp, Homo sapien
  misc_feature (1)...(383): n = A,T,C or G
aaaacaaacaaacaaaaaaaacaattcttcattcagaaaaattatcttagggactgatattggtaattatggtcaatttaatwrtrttktggggcatttccttacattgtcttgacaagattaaaatgtctgtgccaaaattttgtattttatttggagacttcttatcaaaagtaatgctgccaaaggaagtctaaggaattagtagtgttcccmtcacttgtttggagtgtgctattctaaaagattttgatttcctggaatgacaattatattttaactttggtgggggaaanagttataggaccacagtcttcacttctgatacttgtaaattaatcttttattgcacttgttttgaccattaagctatatgtttaaaa

SEQ ID NO: 224 - DNA, 320 bp, Homo sapien
cccctgaaggcttcttgttagaaaatagtacagttacaaccaataggaacaacaaaaagaaaaagtttgtgacattgtagtagggagtgtgtaccccttactccccatcaaaaaaaaaatggatacatggttaaaggataraagggcaatattttatcatatgttctaaaagagaaggaagagaaaatactactttctcraaatggaagcccttaaaggtgctttgatactgaaggacacaaatgtggccgtccatcctcctttaragttgcatgacttggacacggtaactgttgcagttttaractcmgcattgtgac

SEQ ID NO: 225 - DNA, 1214 bp, Homo sapien
gaggactgcagcccgcactcgcagccctggcaggcggcactggtcatggaaaacgaattgttctgctcgggcgtcctggtgcatccgcagtgggtgctgtcagccgcacactgtttccagaactcctacaccatcgggctgggcctgcacagtcttgaggccgaccaagagccagggagccagatggtggaggccagcctctccgtacggcacccagagtacaacagacccttgctcgctaacgacctcatgctcatcaagttggacgaatccgtgtccgagtctgacaccatccggagcatcagcattgcttcgcagtgccctaccgcggggaactcttgcctcgtttctggctggggtctgctggcgaacggcagaatgcctaccgtgctgcagtgcgtgaacgtgtcggtggtgtctgaggaggtctgcagtaagctctatgacccgctgtaccaccccagcatgttctgcgccggcggagggcaagaccagaaggactcctgcaacggtgactctggggggcccctgatctgcaacgggtacttgcagggccttgtgtctttcggaaaagccccgtgtggccaagttggcgtgccaggtgtctacaccaacctctgcaaattcactgagtggatagagaaaaccgtccaggccagttaactctggggactgggaacccatgaaattgacccccaaatacatcctgcggaaggaattcaggaatatctgttcccagcccctcctccctcaggcccaggagtccaggcccccagcccctcctccctcaaaccaagggtacagatccccagcccctcctccctcagacccaggagtccagaccccccagcccctcctccctcagacccaggagtccagcccctcctccctcagacccaggagtccagaccccccagcccctcctccctcagacccaggggtccaggcccccaacccctcctccctcagactcagaggtccaagcccccaacccctccttccccagacccagaggtccaggtcccagcccctcctccctcagacccagcggtccaatgccacctagactctccctgtacacagtgcccccttgtggcacgttgacccaaccttaccagttggtttttcattttttgtccctttcccctagatccagaaataaagtctaagagaagcgcaaaaaaaaaaaaaaaaaaaaaaaaaaaaaaaaaaaa

SEQ ID NO: 226 - DNA, 119 bp, Homo sapien
acccagtatgtgcagggagacggaaccccatgtgacagcccactccaccagggttcccaaagaacctggcccagtcataatcattcatcctgacagtggcaataatcacgataaccagt

SEQ ID NO: 227 - DNA, 818 bp, Homo sapien
acaattcatagggacgaccaatgaggacagggaatgaacccggctctcccccagccctgatttttgctacatatggggtcccttttcattctttgcaaaaacactgggttttctgagaacacggacggttcttagcacaatttgtgaaatctgtgtaraaccgggctttgcaggggagataattttcctcctctggaggaaaggtggtgattgacaggcagggagacagtgacaaggctagagaaagccacgctcggccttctctgaaccaggatggaacggcagacccctgaaaacgaagcttgtccccttccaatcagccacttctgagaacccccatctaacttcctactggaaaagagggcctcctcaggagcagtccaagagttttcaaagataacgtgacaactaccatctagaggaaagggtgcaccctcagcagagaagccgagagcttaactctggtcgtttccagagacaacctgctggctgtcttgggatgcgcccagcctttgagaggccactaccccatgaacttctgccatccactggacatgaagctgaggacactgggcttcaacactgagttgtcatgagagggacaggctctgccctcaagccggctgagggcagcaaccactctcctcccctttctcacgcaaagccattcccacaaatccagaccataccatgaagcaacgagacccaaacagtttggctcaagaggatatgaggactgtctcagcctggctttgggctgacaccatgcacacacacaaggtccacttctaggttttcagcctagatgggagtcgtgt

SEQ ID NO: 228 - DNA, 744 bp, Homo sapien
actggagacactgttgaacttgatcaagacccagaccaccccaggtctccttcgtgggatgtcatgacgtttgacatacctttggaacgagcctcctccttggaagatggaagaccgtgttcgtggccgacctggcctctcctggcctgtttcttaagatgcggagtcacatttcaatggtaggaaaagtggcttcgtaaaatagaagagcagtcactgtggaactaccaaatggcgagatgctcggtgcacattggggtgctttgggataaaagatttatgagccaactattctctggcaccagattctaggccagtttgttccactgaagcttttcccacagcagtccacctctgcaggctggcagctgaatggcttgccggtggctctgtggcaagatcacactgagatcgatgggtgagaaggctaggatgcttgtctagtgttcttagctgtcacgttggctccttccaggttggccagacggtgttggccactcccttctaaaacacaggcgccctcctggtgacagtgacccgccgtggtatgccttggcccattccagcagtcccagttatgcatttcaagtttggggtttgttcttttcgttaatgttcctctgtgttgtcagctgtcttcatttcctgggctaagcagcattgggagatgtggaccagagatccactccttaagaaccagtggcgaaagacactttctttcttcactctgaagtagctggtggt

SEQ ID NO: 229 - DNA, 300 bp, Homo sapien
cgagtctgggttttgtctataaagtttgatccctccttttctcatccaaatcatgtgaaccattacacatcgaaataaaagaaaggtggcagacttgcccaacgccaggctgacatgtgctgcagggttgttgttttttaattattattgttagaaacgtcacccacagtccctgttaatttgtatgtgacagccaactctgagaaggtcctatttttccacctgcagaggatccagtctcactaggctcctccttgccctcacactggagtctccgccagtgtgggtgcccactgacat

SEQ ID NO: 230 - DNA, 301 bp, Homo sapien
cagcagaacaaatacaaatatgaagagtgcaaagatctcataaaatctatgctgaggaatgagcgacagttcaaggaggagaagcttgcagagcagctcaagcaagctgaggagctcaggcaatataaagtcctggttcacactcaggaacgagagctgacccagttaagggagaagttgcgggaagggagagatgcctccctctcattgaatgagcatctccaggccctcctcactccggatgaaccggacaagtcccaggggcaggacctccaagaaacagacctcggccgcgaccacg

SEQ ID NO: 231 - DNA, 301 bp, Homo sapien
gcaagcacgctggcaaatctctgtcaggtcagctccagagaagccattagtcattttagccaggaactccaagtccacatccttggcaactggggacttgcgcaggttagccttgaggatggcaacacgggacttctcatcaggaagtgggatgtagatgagctgatcaagacggccaggtctgaggatggcaggatcaatgatgtcaggccggttggtaccgccaatgatgaacacatttttttttgtggacatgccatccatttctgtcaggatctggttgatgactcggtcagcagcc

SEQ ID NO: 232 - DNA, 301 bp, Homo sapien
agtaggtatttcgtgagaagttcaacaccaaaactggaacatagttctccttcaagtgttggcgacagcggggcttcctgattctggaatataactttgtgtaaattaacagccacctatagaagagtccatctgctgtgaaggagagacagagaactctgggttccgtcgtcctgtccacgtgctgtaccaagtgctggtgccagcctgttacctgttctcactgaaaatctggctaatgctcttgtgtatcacttctgattctgacaatcaatcaatcaatggcctagagcactgactg

SEQ ID NO: 233 - DNA, 301 bp, Homo sapien
atgactgacttcccagtaaggctctctaaggggtaagtaggaggatccacaggatttgagatgctaaggccccagagatcgtttgatccaaccctcttattttcagaggggaaaatggggcctagaagttacagagcatctagctggtgcgctggcacccctggcctcacacagactcccgagtagctgggactacaggcacacagtcactgaagcaggccctgttagcaattctatgcgtacaaattaacatgagatgagtagagactttattgagaaagcaagagaaaatcctatcaac

SEQ ID NO: 234 - DNA, 301 bp, Homo sapien
aggtcctacacatcgagactcatccatgattgatatgaatttaaaaattacaagcaaagacattttattcatcatgatgctttcttttgtttcttcttttcgttttcttctttttctttttcaatttcagcaacatacttctcaatttcttcaggatttaaaatcttgagggattgatctcgcctcatgacagcaagttcaatgtttttgccacctgactgaaccacttccaggagtgccttgatcaccagcttaatggtcagatcatctgcttcaatggcttcgtcagtatagttcttct

SEQ ID NO: 235 - DNA, 283 bp, Homo sapien
tggggctgtgcatcaggcgggtttgagaaatattcaattctcagcagaagccagaatttgaattccctcatcttttagggaatcatttaccaggtttggagaggattcagacagctcaggtgctttcactaatgtctctgaacttctgtccctctttgttcatggatagtccaataaataatgttatctttgaactgatgctcataggagagaatataagaactctgagtgatatcaacattagggattcaaagaaatattagatttaagctcacactggtca

SEQ ID NO: 236 - DNA, 301 bp, Homo sapien
aggtcctccaccaactgcctgaagcacggttaaaattgggaagaagtatagtgcagcataaatacttttaaatcgatcagatttccctaacccacatgcaatcttcttcaccagaagaggtcggagcagcatcattaataccaagcagaatgcgtaatagataaatacaatggtatatagtgggtagacggcttcatgagtacagtgtactgtggtatcgtaatctggacttgggttgtaaagcatcgtgtaccagtcagaaagcatcaatactcgacatgaacgaatataaagaacacca

SEQ ID NO: 237 - DNA, 301 bp, Homo sapien
cagtggtagtggtggtggacgtggcgttggtcgtggtgccttttttggtgcccgtcacaaactcaatttttgttcgctcctttttggccttttccaatttgtccatctcaattttctgggccttggctaatgcctcatagtaggagtcctcagaccagccatggggatcaaacatatcctttgggtagttggtgccaagctcgtcaatggcacagaatggatcagcttctcgtaaatctagggttccgaaattctttcttcctttggataatgtagttcatatccattccctcctttatct

SEQ ID NO: 238 - DNA, 301 bp, Homo sapien
gggcaggtttttttttttttttttttgatggtgcagacccttgctttatttgtctgacttgttcacagttcagccccctgctcagaaaaccaacgggccagctaaggagaggaggaggcaccttgagacttccggagtcgaggctctccagggttccccagcccatcaatcattttctgcaccccctgcctgggaagcagctccctggggggtgggaatgggtgactagaagggatttcagtgtgggacccagggtctgttcttcacagtaggaggtggaagggatgactaatttctttat

SEQ ID NO: 239 - DNA, 239 bp, Homo sapien
ataagcagctagggaattctttatttagtaatgtcctaacataaaagttcacataactgcttctgtcaaaccatgatactgagctttgtgacaacccagaaataactaagagaaggcaaacataataccttagagatcaagaaacatttacacagttcaactgtttaaaaatagctcaacattcagccagtgagtagagtgtgaatgccagcatacacagtatacaggtccttcaggga

SEQ ID NO: 240 - DNA, 300 bp, Homo sapien
ggtcctaatgaagcagcagcttccacattttaacgcaggtttacggtgatactgtcctttgggatctgccctccagtggaaccttttaaggaagaagtgggcccaagctaagttccacatgctgggtgagccagatgacttctgttccctggtcactttcttcaatggggcgaatgggggctgccaggtttttaaaatcatgcttcatcttgaagcacacggtcacttcaccctcctcacgctgtgggtgtactttgatgaaaatacccactttgttggcctttctgaagctataatgtc

SEQ ID NO: 241 - DNA, 301 bp, Homo sapien
gaggtctggtgctgaggtctctgggctaggaagaggagttctgtggagctggaagccagacctctttggaggaaactccagcagctatgttggtgtctctgagggaatgcaacaaggctgctcctccatgtattggaaaactgcaaactggactcaactggaaggaagtgctgctgccagtgtgaagaaccagcctgaggtgacagaaacggaagcaaacaggaacagccagtcttttcttcctcctcctgtcatacggtctctctcaagcatcctttgttgtcaggggcctaaaagggag

SEQ ID NO: 242 - DNA, 301 bp, Homo sapien
ccgaggtcctgggatgcaaccaatcactctgtttcacgtgacttttatcaccatacaatttgtggcatttcctcattttctacattgtagaatcaagagtgtaaataaatgtatatcgatgtcttcaagaatatatcattcctttttcactagaacccattcaaaatataagtcaagaatcttaatatcaacaaatatatcaagcaaactggaaggcagaataactaccataatttagtataagtacccaaagttttataaatcaaaagccctaatgataaccatttttagaattcaatca

SEQ ID NO: 243 - DNA, 301 bp, Homo sapien
aggtaagtcccagtttgaagctcaaaagatctggtatgagcataggctcatcgacgacatggtggcccaagctatgaaatcagagggaggcttcatctgggcctgtaaaaactatgatggtgacgtgcagtcggactctgtggcccaagggtatggctctctcggcatgatgaccagcgtgctggtttgtccagatggcaagacagtagaagcagaggctgcccacgggactgtaacccgtcactaccgcatgttccagaaaggacaggagacgtccaccaatcccattgcttccattttt

SEQ ID NO: 244 - DNA, 300 bp, Homo sapien
gctggtttgcaagaatgaaatgaatgattctacagctaggacttaaccttgaaatggaaagtcatgcaatcccatttgcaggatctgtctgtgcacatgcctctgtagagagcagcattcccagggaccttggaaacagttgacactgtaaggtgcttgctccccaagacacatcctaaaaggtgttgtaatggtgaaaacgtcttccttctttattgccccttcttatttatgtgaacaactgtttgtcttttgtgtatcttttttaaactgtaaagttcaattgtgaaaatgaatatc

SEQ ID NO: 245 - DNA, 301 bp, Homo sapien
gtctgagtatttaaaatgttattgaaattatccccaaccaatgttagaaaagaaagaggttatatacttagataaaaaatgaggtgaattactatccattgaaatcatgctcttagaattaaggccaggagatattgtcattaatgtaracttcaggacactagagtatagcagccctatgttttcaaagagcagagatgcaattaaatattgtttagcatcaaaaaggccactcaatacagctaataaaatgaaagacctaatttctaaagcaattctttataatttacaaagttttaag

SEQ ID NO: 246 - DNA, 301 bp, Homo sapien
ggtctgtcctacaatgcctgcttcttgaaagaagtcggcactttctagaatagctaaataacctgggcttattttaaagaactatttgtagctcagattggttttcctatggctaaaataagtgcttcttgtgaaaattaaataaaacagttaattcaaagccttgatatatgttaccactaacaatcatactaaatatattttgaagtacaaagtttgacatgctctaaagtgacaacccaaatgtgtcttacaaaacacgttcctaacaaggtatgctttacactaccaatgcagaaac

SEQ ID NO: 247 - DNA, 301 bp, Homo sapien
aggtcctttggcagggctcatggatcagagctcaaactggagggaaaggcatttcgggtagcctaagagggcgactggcggcagcacaaccaaggaaggcaaggttgtttcccccacgctgtgtcctgtgttcaggtgcgacacacaatcctcatgggaacaggatcacccatgcgctgcccttgatgatcaaggttggggcttaagtggattaagggaggcaagttctgggttccttgccttttcaaaccatgaagtcaggctctgtatccctccttttcctaactgatattctaactaa

SEQ ID NO: 248 - DNA, 301 bp, Homo sapien
aggtccttggagatgccatttcagccgaaggactcttctwttcggaagtacaccctcactattaggaagattcttaggggtaatttttctgaggaaggagaactagccaacttaagaattacaggaagaaagtggtttggaagacagccaaagaaataaaagcagattaaattgtatcaggtacattccagcctgttggcaactccataaaaacatttcagattttaatcccgaatttagctaatgagactggatttttgttttttatgttgtgtgtcgcagagctaaaaactcagttccc

SEQ ID NO: 249 - DNA, 301 bp, Homo sapien
gtccagaggaagcacctggtgctgaactaggcttgccctgctgtgaacttgcacttggagccctgacgctgctgttctccccgaaaaacccgaccgacctccgcgatctccgtcccgcccccagggagacacagcagtgactcagagctggtcgcacactgtgcctccctcctcaccgcccatcgtaatgaattattttgaaaattaattccaccatcctttcagattctggatggaaagactgaatctttgactcagaattgtttgctgaaaagaatgatgtgactttcttagtcattta

SEQ ID NO: 250 - DNA, 301 bp, Homo sapien
ggtctgtgacaaggacttgcaggctgtgggaggcaagtgacccttaacactacacttctccttatctttattggcttgataaacataattatttctaacactagcttatttccagttgcccataagcacatcagtacttttctctggctggaatagtaaactaaagtatggtacatctacctaaaagactactatgtggaataatacatactaatgaagtattacatgatttaaagactacaataaaaccaaacatgcttataacattaagaaaaacaataaagatacatgattgaaacca

SEQ ID NO: 251 - DNA, 301 bp, Homo sapien
gccgaggtcctacatttggcccagtttccccctgcatcctctccagggcccctgcctcatagacaacctcatagagcataggagaactggttgccctgggggcagggggactgtctggatggcaggggtcctcaaaaatgccactgtcactgccaggaaatgcttctgagcagtacacctcattgggatcaatgaaaagcttcaagaaatcttcaggctcactctcttgaaggcccggaacctctggaggggggcagtggaatcccagctccaggacggatcctgtcgaaaagatatcctc

SEQ ID NO: 252 - DNA, 301 bp, Homo sapien
gcaaccaatcactctgtttcacgtgacttttatcaccatacaatttgtggcatttcctcattttctacattgtagaatcaagagtgtaaataaatgtatatcgatgtcttcaagaatatatcattcctttttcactaggaacccattcaaaatataagtcaagaatcttaatatcaacaaatatatcaagcaaactggaaggcagaataactaccataatttagtataagtacccaaagttttataaatcaaaagccctaatgataaccatttttagaattcaatcatcactgtagaatca

SEQ ID NO: 253 - DNA, 301 bp, Homo sapien
ttccctaagaagatgttattttgttgggttttgttccccctccatctcgattctcgtacccaactaaaaaaaaaaaataaagaaaaaatgtgctgcgttctgaaaaataactccttagcttggtctgattgttttcagaccttaaaatataaacttgtttcacaagctttaatccatgtggattttttttcttagagaaccacaaaacataaaaggagcaagtcggactgaatacctgtttccatagtgcccacagggtattcctcacattttctccataggaaaatgctttttcccaagg

SEQ ID NO: 254 - DNA, 301 bp, Homo sapien
cgctgcgcctttcccttgggggaggggcaaggccagagggggtccaagtgcagcacgaggaacttgaccaattcccttgaagcgggtgggttaaaccctgtaaatgggaacaaaatccccccaaatctcttcatcttaccctggtggactcctgactgtagaattttttggttgaaacaagaaaaaaataaagctttggacttttcaaggttgcttaacaggtactgaaagactggcctcacttaaactgagccaggaaaagctgcagatttattaatgggtgtgttagtgtgcagtgcct

SEQ ID NO: 255 - DNA, 302 bp, Homo sapien
agctttttttttttttttttttttttttttttcattaaaaaatagtgctctttattataaattactgaaatgtttcttttctgaatataaatataaatatgtgcaaagtttgacttggattgggattttgttgagttcttcaagcatctcctaataccctcaagggcctgagtaggggggaggaaaaaggactggaggtggaatctttataaaaaacaagagtgattgaggcagattgtaaacattattaaaaaacaagaaacaaacaaaaaaatagagaaaaaaaccaccccaacacacaa

SEQ ID NO: 256 - DNA, 301 bp, Homo sapien
  misc_feature (1)...(301): n = A,T,C or G
gttccagaaaacattgaaggtggcttcccaaagtctaactagggataccccctctagcctaggaccctcctccccacacctcaatccaccaaaccatccataatgcacccagataggcccacccccaaaagcctggacaccttgagcacacagttatgaccaggacagactcatctctataggcaaatagctgctggcaaactggcattacctggtttgtggggatgggggggcaagtgtgtggcctctcggcctggttagcaagaacattcagggtaggcctaagttantcgtgttagtt

SEQ ID NO: 257 - DNA, 301 bp, Homo sapien
gttgtggaggaactctggcttgctcattaagtcctactgattttcactatcccctgaatttccccacttatttttgtctttcactatcgcaggccttagaagaggtctacctgcctccagtcttacctagtccagtctaccccctggagttagaatggccatcctgaagtgaaaagtaatgtcacattactcccttcagtgatttcttgtagaagtgccaatccctgaatgccaccaagatcttaatcttcacatctttaatcttatctctttgactcctctttacaccggagaaggctcc

SEQ ID NO: 258 - DNA, 301 bp, Homo sapien
  misc_feature (1)...(301): n = A,T,C or G
cagcagtagtagatgccgtatgccagcacgcccagcactcccaggatcagcaccagcaccaggggcccagccaccaggcgcagaagcaagataaacagtaggctcaagaccagagccacccccagggcaacaagaatccaataccaggactgggcaaaatcttcaaagatcttaacactgatgtctcgggcattgaggctgtcaataanacgctgatcccctgctgtatggtggtgtcattggtgatccctgggagcgccggtggagtaacgttggtccatggaaagcagcgcccacaact

SEQ ID NO: 259 - DNA, 301 bp, Homo sapien
  misc_feature (1)...(301): n = A,T,C or G
tcatatatgcaaacaaatgcagactangcctcaggcagagactaaaggacatctcttggggtgtcctgaagtgatttggacccctgagggcagacacctaagtaggaatcccagtgggaagcaaagccataaggaagcccaggattccttgtgatcaggaagtgggccaggaaggtctgttccagctcacatctcatctgcatgcagcacggaccggatgcgcccactgggtcttggcttccctcccatcttctcaagcagtgtccttgttgagccatttgcatccttggctccaggtggc

SEQ ID NO: 260 - DNA, 301 bp, Homo sapien
ttttttttctccctaaggaaaaagaaggaacaagtctcataaaaccaaataagcaatggtaaggtgtcttaacttgaaaaagattaggagtcactggtttacaagttataattgaatgaaagaactgtaacagccacagttggccatttcatgccaatggcagcaaacaacaggattaactagggcaaaataaataagtgtgtggaagccctgataagtgcttaataaacagactgattcactgagacatcagtacctgcccgggcggccgctcgagccgaattctgcagatatccatcac

SEQ ID NO: 261 - DNA, 301 bp, Homo sapien
aaatattcgagcaaatcctgtaactaatgtgtctccataaaaggctttgaactcagtgaatctgcttccatccacgattctagcaatgacctctcggacatcaaagctcctcttaaggttagcaccaactattccatacaattcatcagcaggaaataaaggctcttcagaaggttcaatggtgacatccaatttcttctgataatttagattcctcacaaccttcctagttaagtgaagggcatgatgatcatccaaagcccagtggtcacttactccagactttctgcaatgaagatca

SEQ ID NO: 262 - DNA, 301 bp, Homo sapien
gaggagagcctgttacagcatttgtaagcacagaatactccaggagtatttgtaattgtctgtgagcttcttgccgcaagtctctcagaaatttaaaaagatgcaaatccctgagtcacccctagacttcctaaaccagatcctctggggctggaacctggcactctgcatttgtaatgagggctttctggtgcacacctaattttgtgcatctttgccctaaatcctggattagtgccccatcattacccccacattataatgggatagattcagagcagatactctccagcaaagaatc

SEQ ID NO: 263 - DNA, 301 bp, Homo sapien
  misc_feature (1)...(301): n = A,T,C or G
tttagcttgtggtaaatgactcacaaaactgattttaaaatcaagttaatgtgaattttgaaaattactacttaatcctaattcacaataacaatggcattaaggtttgacttgagttggttcttagtattatttatggtaaataggctcttaccacttgcaaataactggccacatcattaatgactgacttcccagtaaggctctctaaggggtaagtangaggatccacaggatttgagatgctaaggccccagagatcgtttgatccaaccctcttattttcagaggggaaaatggg

SEQ ID NO: 264 - DNA, 301 bp, Homo sapien
aaagacgttaaaccactctactaccacttgtggaactctcaaagggtaaatgacaaasccaatgaatgactctaaaaacaatatttacatttaatggtttgtagacaataaaaaaacaaggtggatagatctagaattgtaacattttaagaaaaccatascatttgacagatgagaaagctcaattatagatgcaaagttataactaaactactatagtagtaaagaaatacatttcacacccttcatataaattcactatcttggcttgaggcactccataaaatgtatcacgtgcata

SEQ ID NO: 265 - DNA, 301 bp, Homo sapien
tgcccaagttatgtgtaagtgtatccgcacccagaggtaaaactacactgtcatctttgtcttcttgtgacgcagtatttcttctctggggagaagccgggaagtcttctcctggctctacatattcttggaagtctctaatcaacttttgttccatttgtttcatttcttcaggagggattttcagtttgtcaacatgttctctaacaacacttgcccatttctgtaaagaatccaaagcagtccaaggctttgacatgtcaacaaccagcataactagagtatccttcagagatacggc

SEQ ID NO: 266 - DNA, 301 bp, Homo sapien
taccgtctgcccttcctcccatccaggccatctgcgaatctacatgggtcctcctattcgacaccagatcactctttcctctacccacaggcttgctatgagcaagagacacaacctcctctcttctgtgttccagcttcttttcctgttcttcccaccccttaagttctattcctggggatagagacaccaatacccataacctctctcctaagcctccttataacccagggtgcacagcacagactcctgacaactggtaaggccaatgaactgggagctcacagctggctgtgcctga

SEQ ID NO: 267 - DNA, 301 bp, Homo sapien
aaagagcacaggccagctcagcctgccctggccatctagactcagcctggctccatgggggttctcagtgctgagtccatccaggaaaagctcacctagaccttctgaggctgaatcttcatcctcacaggcagcttctgagagcctgatattcctagccttgatggtctggagtaaagcctcattctgattcctctccttcttttctttcaagttggctttcctcacatccctctgttcaattcgcttcagcttgtctgctttagccctcatttccagaagcttcttctctttggcatct

SEQ ID NO: 268 - DNA, 301 bp, Homo sapien
aatgtctcactcaactacttcccagcctaccgtggcctaattctgggagttttcttcttagatcttgggagagctggttcttctaaggagaaggaggaaggacagatgtaactttggatctcgaagaggaagtctaatggaagtaattagtcaacggtccttgtttagactcttggaatatgctgggtggctcagtgagcccttttggagaaagcaagtattattcttaaggagtaaccacttcccattgttctactttctaccatcatcaattgtatattatgtattctttggagaacta

SEQ ID NO: 269 - DNA, 301 bp, Homo sapien
taacaatatacactagctatctttttaactgtccatcattagcaccaatgaagattcaataaaattacctttattcacacatctcaaaacaattctgcaaattcttagtgaagtttaactatagtcacagaccttaaatattcacattgttttctatgtctactgaaaataagttcactacttttctggatattctttacaaaatcttattaaaattcctggtattatcacccccaattatacagtagcacaaccaccttatgtagtttttacatgatagctctgtagaagtttcacatct

SEQ ID NO: 270 - DNA, 301 bp, Homo sapien
cattgaagagcttttgcgaaacatcagaacacaagtgcttataaaattaattaagccttacacaagaatacatattccttttatttctaaggagttaaacatagatgtagctgatgtggagagcttgctggtgcagtgcatattggataacactattcatggccgaattgatcaagtcaaccaactccttgaactggatcatcagaagaagggtggtgcacgatatactgcactagataatggaccaaccaactaaattctctcaccaggctgtatcagtaaactggcttaacagaaaaca

SEQ ID NO: 271 - DNA, 301 bp, Homo sapien
  misc_feature (1)...(301): n = A,T,C or G
aaaaggttctcataagattaacaatttaaataaatatttgatagaacattctttctcatttttatagctcatctttagggttgatattcagttcatgcttcccttgctgttcttgatccagaattgcaatcacttcatcagcctgtattcgctccaattctctataaagtgggtccaaggtgaaccacagagccacagcacacctctttcccttggtgactgccttcaccccatganggttctctcctccagatganaactgatcatgcgcccacattttgggttttatagaagcagtcac

SEQ ID NO: 272 - DNA, 301 bp, Homo sapien
taaattgctaagccacagataacaccaatcaaatggaacaaatcactgtcttcaaatgtcttatcagaaaaccaaatgagcctggaatcttcataatacctaaacatgccgtatttaggatccaataattccctcatgatgagcaagaaaaattctttgcgcacccctcctgcatccacagcatcttctccaacaaatataaccttgagtggcttcttgtaatctatgttctttgttttcctaaggacttccattgcatctcctacaatattttctctacgcaccactagaattaagcagg

SEQ ID NO: 273 - DNA, 301 bp, Homo sapien
  misc_feature (1)...(301): n = A,T,C or G
acatgtgtgtatgtgtatctttgggaaaanaanaagacatcttgtttaytatttttttggagagangctgggacatggataatcacwtaatttgctaytatyactttaatctgactygaagaaccgtctaaaaataaaatttaccatgtcdtatattccttatagtatgcttatttcaccttytttctgtccagagagagtatcagtgacananatttmagggtgaamacatgmattggtgggacttntytttacngagmaccctgcccgsgcgccctcgmakcnganttccgcsananct

SEQ ID NO: 274 - DNA, 301 bp, Homo sapien
  misc_feature (1)...(301): n = A,T,C or G
cttatatactctttctcagaggcaaaagaggagatgggtaatgtagacaattctttgaggaacagtaaatgattattagagagaangaatggaccaaggagacagaaattaacttgtaaatgattctctttggaatctgaatgagatcaagaggccagctttagcttgtggaaaagtccatctaggtatggttgcattctcgtcttcttttctgcagtagataatgaggtaaccgaaggcaattgtgcttcttttgataagaagctttcttggtcatatcaggaaattccaganaaagtcc

SEQ ID NO: 275 - DNA, 301 bp, Homo sapien
  misc_feature (1)...(301): n = A,T,C or G
tcggtgtcagcagcacgtggcattgaacattgcaatgtggagcccaaaccacagaaaatggggtgaaattggccaactttctattaacttatgttggcaattttgccaccaacagtaagctggcccttctaataaaagaaaattgaaaggtttctcactaaacggaattaagtagtggagtcaagagactcccaggcctcagcgtacctgcccgggcggccgctcgaagccgaattctgcagatatccatcacactggcggncgctcgancatgcatctagaaggnccaattcgccctata

SEQ ID NO: 276 - DNA, 301 bp, Homo sapien
tgtacacatactcaataaataaatgactgcattgtggtattattactatactgattatatttatcatgtgacttctaattagaaaatgtatccaaaagcaaaacagcagatatacaaaattaaagagacagaagatagacattaacagataaggcaacttatacattgagaatccaaatccaatacatttaaacatttgggaaatgagggggacaaatggaagccagatcaaatttgtgtaaaactattcagtatgtttcccttgcttcatgtctgagaaggctctccttcaatggggatg

SEQ ID NO: 277 - DNA, 301 bp, Homo sapien
  misc_feature (1)...(301): n = A,T,C or G
tttgttgatgtcagtattttattacttgcgttatgagtgctcacctgggaaattctaaagatacagaggacttggaggaagcagagcaactgaatttaatttaaaagaaggaaaacattggaatcatggcactcctgatactttcccaaatcaacactctcaatgccccaccctcgtcctcaccatagtggggagactaaagtggccacggatttgccttangtgtgcagtgcgttctgagttcnctgtcgattacatctgaccagtctcctttttccgaagtccntccgttcaatcttgc

SEQ ID NO: 278 - DNA, 301 bp, Homo sapien
  misc_feature (1)...(301): n = A,T,C or G
taccactacactccagcctgggcaacagagcaagacctgtctcaaagcataaaatggaataacatatcaaatgaaacagggaaaatgaagctgacaatttatggaagccagggcttgtcacagtctctactgttattatgcattacctgggaatttatataagcccttaataataatgccaatgaacatctcatgtgtgctcacaatgttctggcactattataagtgcttcacaggttttatgtgttcttcgtaactttatggantaggtactcggccgcgaacacgctaagccgaattc

SEQ ID NO: 279 - DNA, 301 bp, Homo sapien
  misc_feature (1)...(301): n = A,T,C or G
aaagcaggaatgacaaagcttgcttttctggtatgttctaggtgtattgtgacttttactgttatattaattgccaatataagtaaatatagattatatatgtatagtgtttcacaaagcttagacctttaccttccagccaccccacagtgcttgatatttcagagtcagtcattggttatacatgtgtagttccaaagcacataagctagaanaanaaatatttctagggagcactaccatctgttttcacatgaaatgccacacacatagaactccaacatcaatttcattgcacaga

SEQ ID NO: 280 - DNA, 301 bp, Homo sapien
ggtactggagttttcctcccctgtgaaaacgtaactactgttgggagtgaattgaggatgtagaaaggtggtggaaccaaattgtggtcaatggaaataggagaatatggttctcactcttgagaaaaaaacctaagattagcccaggtagttgcctgtaacttcagtttttctgcctgggtttgatatagtttagggttggggttagattaagatctaaattacatcaggacaaagagacagactattaactccacagttaattaaggaggtatgttccatgtttatttgttaaagcagt

SEQ ID NO: 281 - DNA, 301 bp, Homo sapien
aggtacaagaaggggaatgggaaagagctgctgctgtggcattgttcaacttggatattcgccgagcaatccaaatcctgaatgaaggggcatcttctgaaaaaggagatctgaatctcaatgtggtagcaatggctttatcgggttatacggatgagaagaactccctttggagagaaatgtgtagcacactgcgattacagctaaataacccgtatttgtgtgtcatgtttgcatttctgacaagtgaaacaggatcttacgatggagttttgtatgaaaacaaagttgcagtacctcg

SEQ ID NO: 282 - DNA, 301 bp, Homo sapien
caggtactacagaattaaaatactgacaagcaagtagtttcttggcgtgcacgaattgcatccagaacccaaaaattaagaaattcaaaaagacattttgtgggcacctgctagcacagaagcgcagaagcaaagcccaggcagaaccatgctaaccttacagctcagcctgcacagaagcgcagaagcaaagcccaggcagaaccatgctaaccttacagctcagcctgcacagaagcgcagaagcaaagcccaggcagaacatgctaaccttacagctcagcctgcacagaagcacaga

SEQ ID NO: 283 - DNA, 301 bp, Homo sapien
atctgtatacggcagacaaactttataragtgtagagaggtgagcgaaaggatgcaaaagcactttgagggctttataataatatgctgcttgaaaaaaaaaatgtgtagttgatactcagtgcatctccagacatagtaaggggttgctctgaccaatcaggtgatcattttttctatcacttcccaggttttatgcaaaaattttgttaaattctataatggtgatatgcatcttttaggaaacatatacatttttaaaaatctattttatgtaagaactgacagacgaatttgctttg

SEQ ID NO: 284 - DNA, 301 bp, Homo sapien
caggtacaaaacgctattaagtggcttagaatttgaacatttgtggtctttatttactttgcttcgtgtgtgggcaaagcaacatcttccctaaatatatattaccaagaaaagcaagaagcagattaggtttttgacaaaacaaacaggccaaaagggggctgacctggagcagagcatggtgagaggcaaggcatgagagggcaagtttgttgtggacagatctgtgcctactttattactggagtaaaagaaaacaaagttcattgatgtcgaaggatatatacagtgttagaaatta

SEQ ID NO: 285 - DNA, 301 bp, Homo sapien
  misc_feature (1)...(301): n = A,T,C or G
acatcaccatgatcggatcccccacccattatacgttgtatgtttacataaatactcttcaatgatcattagtgttttaaaaaaaatactgaaaactccttctgcatcccaatctctaaccaggaaagcaaatgctatttacagacctgcaagccctccctcaaacnaaactatttctggattaaatatgtctgacttcttttgaggtcacacgactaggcaaatgctatttacgatctgcaaaagctgtttgaagagtcaaagcccccatgtgaacacgatttctggaccctgtaacagt

SEQ ID NO: 286 - DNA, 301 bp, Homo sapien
taccactgcattccagcctgggtgacagagtgagactccgtctccaaaaaaaactttgcttgtatattatttttgccttacagtggatcattctagtaggaaaggacagtaagattttttatcaaaatgtgtcatgccagtaagagatgttatattcttttctcatttcttccccacccaaaaataagctaccatatagcttataagtctcaaatttttgccttttactaaaatgtgattgtttctgttcattgtgtatgcttcatcacctatattaggcaaattccattttttcccttgt

SEQ ID NO: 287 - DNA, 301 bp, Homo sapien
tacagatctgggaactaaatattaaaaatgagtgtggctggatatatggagaatgttgggcccagaaggaacgtagagatcagatattacaacagctttgttttgagggttagaaatatgaaatgatttggttatgaacgcacagtttaggcagcagggccagaatcctgaccctctgccccgtggttatctcctccccagcttggctgcctcatgttatcacagtattccattttgtttgttgcatgtcttgtgaagccatcaagattttctcgtctgttttcctctcattggtaatgct

SEQ ID NO: 288 - DNA, 301 bp, Homo sapien
gtacacctaactgcaaggacagctgaggaatgtaatgggcagccgcttttaaagaagtagagtcaataggaagacaaattccagttccagctcagtctgggtatctgcaaagctgcaaaagatctttaaagacaatttcaagagaatatttccttaaagttggcaatttggagatcatacaaaagcatctgcttttgtgatttaatttagctcatctggccactggaagaatccaaacagtctgccttaattttggatgaatgcatgatggaaattcaataatttagaaagttaaaaaaaa

SEQ ID NO: 289 - DNA, 301 bp, Homo sapien
  misc_feature (1)...(301): n = A,T,C or G
ggtacactgtttccatgttatgtttctacacattgctacctcagtgctcctggaaacttagcttttgatgtctccaagtagtccaccttcatttaactctttgaaactgtatcatctttgccaagtaagagtggtggcctatttcagctgctttgacaaaatgactggctcctgacttaacgttctataaatgaatgtgctgaagcaaagtgcccatggtggcggcgaanaagagaaagatgtgttttgttttggactctctgtggtcccttccaatgctgtgggtttccaaccagnggaa

SEQ ID NO: 290 - DNA, 301 bp, Homo sapien
  misc_feature (1)...(301): n = A,T,C or G
acactgagctcttcttgataaatatacagaatgcttggcatatacaagattctatactactgactgatctgttcatttctctcacagctcttacccccaaaagcttttccaccctaagtgttctgacctccttttctaatcacagtagggatagaggcaganccacctacaatgaacatggagttctatcaagaggcagaaacagcacagaatcccagttttaccattcgctagcagtgctgccttgaacaaaaacatttctccatgtctcattttcttcatgcctcaagtaacagtgaga

SEQ ID NO: 291 - DNA, 301 bp, Homo sapien
caggtaccaatttcttctatcctagaaacatttcattttatgttgttgaaacataacaactatatcagctagattttttttctatgctttacctgctatggaaaatttgacacattctgctttactcttttgtttataggtgaatcacaaaatgtatttttatgtattctgtagttcaatagccatggctgtttacttcatttaatttatttagcataaagacattatgaaaaggcctaaacatgagcttcacttccccactaactaattagcatctgttatttcttaaccgtaatgccta

SEQ ID NO: 292 - DNA, 301 bp, Homo sapien
  misc_feature (1)...(301): n = A,T,C or G
accttttagtagtaatgtctaataataaataagaaatcaattttataaggtccatatagctgtattaaataatttttaagtttaaaagataaaataccatcattttaaatgttggtattcaaaaccaaagnatataaccgaaaggaaaaacagatgagacataaaatgatttgcnagatgggaaatatagtasttyatgaatgttnattaaattccagttataatagtggctacacactctcactacacacacagaccccacagtcctatatgccacaaacacatttccataacttgaaaa

SEQ ID NO: 293 - DNA, 301 bp, Homo sapien
ggtaccaagtgctggtgccagcctgttacctgttctcactgaaaagtctggctaatgctcttgtgtagtcacttctgattctgacaatcaatcaatcaatggcctagagcactgactgttaacacaaacgtcactagcaaagtagcaacagctttaagtctaaatacaaagctgttctgtgtgagaattttttaaaaggctacttgtataataacccttgtcatttttaatgtacctcggccgcgaccacgctaagccgaattctgcagatatccatcacactggcggccgctcgagcatg

SEQ ID NO: 294 - DNA, 301 bp, Homo sapien
  misc_feature (1)...(301): n = A,T,C or G
tgacccataacaatatacactagctatctttttaactgtccatcattagcaccaatgaagattcaataaaattacctttattcacacatctcaaaacaattctgcaaattcttagtgaagtttaactatagtcacagancttaaatattcacattgttttctatgtctactgaaaataagttcactacttttctgggatattctttacaaaatcttattaaaattcctggtattatcacccccaattatacagtagcacaaccaccttatgtagtttttacatgatagctctgtagaggtt

SEQ ID NO: 295 - DNA, 305 bp, Homo sapien
gtactctttctctcccctcctctgaatttaattctttcaacttgcaatttgcaaggattacacatttcactgtgatgtatattgtgttgcaaaaaaaaaagtgtctttgtttaaaattacttggtttgtgaatccatcttgctttttccccattggaactagtcattaacccatctctgaactggtagaaaaacrtctgaagagctagtctatcagcatctgacaggtgaattggatggttctcagaaccatttcacccagacagcctgtttctatcctgtttaataaattagtttgggttctct

SEQ ID NO: 296 - DNA, 301 bp, Homo sapien
aggtactatgggaagctgctaaaataatatttgatagtaaaagtatgtaatgtgctatctcacctagtagtaaactaaaaataaactgaaactttatggaatctgaagttattttccttgattaaatagaattaataaaccaatatgaggaaacatgaaaccatgcaatctactatcaactttgaaaaagtgattgaacgaaccacttagctttcagatgatgaacactgataagtcatttgtcattactataaattttaaaatctgttaataagatggcctatagggaggaaaaaggggc

SEQ ID NO: 297 - DNA, 300 bp, Homo sapien
  misc_feature (1)...(300): n = A,T,C or G
actgagttttaactggacgccaagcaggcaaggctggaaggttttgctctctttgtgctaaaggttttgaaaaccttgaaggagaatcattttgacaagaagtacttaagagtctagagaacaaagangtgaaccagctgaaagctctcgggggaancttacatgtgttgttaggcctgttccatcattgggagtgcactggccatccctcaaaatttgtctgggctggcctgagtggtcaccgcacctcggccgcgaccacgctaagccgaattctgcagatatccatcacactggcgg

SEQ ID NO: 298 - DNA, 301 bp, Homo sapien
  misc_feature (1)...(301): n = A,T,C or G
tatggggtttgtcacccaaaagctgatgctgagaaaggcctccctggggcccctcccgcgggcatctgagagacctggtgttccagtgtttctggaaatgggtcccagtgccgccggctgtgaagctctcagatcaatcacgggaagggcctggcggtggtggccacctggaaccaccctgtcctgtctgtttacatttcactaycaggttttctctgggcattacnatttgttcccctacaacagtgacctgtgcattctgctgtggcctgctgtgtctgcaggtggctctcagcgaggt

SEQ ID NO: 299 - DNA, 301 bp, Homo sapien
gttttgagacggagtttcactcttgttgcccagactggactgcaatggcagggtctctgctcactgcaccctctgcctcccaggttcgagcaattctcctgcctcagcctcccaggtagctgggattgcaggctcacgccaccatacccagctaatttttttgtatttttagtagagacggagtttcgccatgttggccagctggtctcaaactcctgacctcaagcgacctgcctgcctcggcctcccaaagtgctggaattataggcatgagtcaacacgcccagcctaaagatatttt

SEQ ID NO: 300 - DNA, 301 bp, Homo sapien
attcagttttatttgctgccccagtatctgtaaccaggagtgccacaaaatcttgccagatatgtcccacacccactgggaaaggctcccacctggctacttcctctatcagctgggtcagctgcattccacaaggttctcagcctaatgagtttcactacctgccagtctcaaaacttagtaaagcaagaccatgacattcccccacggaaatcagagtttgccccaccgtcttgttactataaagcctgcctctaacagtccttgcttcttcacaccaatcccgagcgcatcccccatg

SEQ ID NO: 301 - DNA, 301 bp, Homo sapien
ttaaatttttgagaggataaaaaggacaaataatctagaaatgtgtcttcttcagtctgcagaggaccccaggtctccaagcaaccacatggtcaagggcatgaataattaaaagttggtgggaactcacaaagaccctcagagctgagacacccacaacagtgggagctcacaaagaccctcagagctgagacacccacaacagtgggagctcacaaagaccctcagagctgagacacccacaacagcacctcgttcagctgccacatgtgtgaataaggatgcaatgtccagaagtgtt

SEQ ID NO: 302 - DNA, 301 bp, Homo sapien
aggtacacatttagcttgtggtaaatgactcacaaaactgattttaaaatcaagttaatgtgaattttgaaaattactacttaatcctaattcacaataacaatggcattaaggtttgacttgagttggttcttagtattatttatggtaaataggctcttaccacttgcaaataactggccacatcattaatgactgacttcccagtaaggctctctaaggggtaagtaggaggatccacaggatttgagatgctaaggccccagagatcgtttgatccaaccctcttattttcagaggg

SEQ ID NO: 303 - DNA, 301 bp, Homo sapien
aggtaccaactgtggaaataggtagaggatcattttttctttccatatcaactaagttgtatattgttttttgacagtttaacacatcttcttctgtcagagattctttcacaatagcactggctaatggaactaccgcttgcatgttaaaaatggtggtttgtgaaatgatcataggccagtaacgggtatgtttttctaactgatcttttgctcgttccaaagggacctcaagacttccatcgattttatatctggggtctagaaaaggagttaatctgttttccctcataaattcacc

SEQ ID NO: 304 - DNA, 301 bp, Homo sapien
acatggatgttattttgcagactgtcaacctgaatttgtatttgcttgacattgcctaattattagtttcagtttcagcttacccactttttgtctgcaacatgcaraasagacagtgccctttttagtgtatcatatcaggaatcatctcacattggtttgtgccattactggtgcagtgactttcagccacttgggtaaggtggagttggccatatgtctccactgcaaaattactgattttccttttgtaattaataagtgtgtgtgtgaagattctttgagatgaggtatatatctc

SEQ ID NO: 305 - DNA, 301 bp, Homo sapien
  misc_feature (1)...(301): n = A,T,C or G
gangtacagcgtggtcaaggtaacaagaagaaaaaaatgtgagtggcatcctgggatgagcagggggacagacctggacagacacgttgtcatttgctgctgtgggtaggaaaatgggcgtaaaggaggagaaacagatacaaaatctccaactcagtattaaggtattctcatgcctagaatattggtagaaacaagaatacattcatatggcaaataactaaccatggtggaacaaaattctgggatttaagttggataccaangaaattgtattaaaagagctgttcatggaataaga

SEQ ID NO: 306 - protein, 8 aa, Homo sapien
VLGWVAEL

SEQ ID NO: 307 - DNA, 637 bp, Homo sapien
acagggratgaagggaaagggagaggatgaggaagcccccctggggatttggtttggtccttgtgatcaggtggtctatggggcttatccctacaaagaagaatccagaaataggggcacattgaggaatgatacttgagcccaaagagcattcaatcattgttttatttgccttmttttcacaccattggtgagggagggattaccaccctggggttatgaagatggttgaacaccccacacatagcaccggagatatgagatcaacagtttcttagccatagagattcacagcccagagcaggaggacgcttgcacaccatgcaggatgacatgggggatgcgctcgggattggtgtgaagaagcaaggactgttagaggcaggctttatagtaacaagacggtggggcaaactctgatttccgtgggggaatgtcatggtcttgctttactaagttttgagactggcaggtagtgaaactcattaggctgagaaccttgtggaatgcacttgacccasctgatagaggaagtagccaggtgggagcctttcccagtgggtgtgggacatatctggcaagattttgtggcactcctggttacagatactggggcagcaaataaaactgaatcttg

SEQ ID NO: 308 - DNA, 647 bp, Homo sapien
  misc_feature (1)...(647): n = A,T,C or G
acgattttcattatcatgtaaatcgggtcactcaaggggccaaccacagctgggagccactgctcaggggaaggttcatatgggactttctactgcccaaggttctatacaggatataaaggngcctcacagtatagatctggtagcaaagaagaagaaacaaacactgatctctttctgccacccctctgaccctttggaactcctctgaccctttagaacaagcctacctaatatctgctagagaaaagaccaacaacggcctcaaaggatctcttaccatgaaggtctcagctaattcttggctaagatgtgggttccacattaggttctgaatatggggggaagggtcaatttgctcattttgtgtgtggataaagtcaggatgcccaggggccagagcagggggctgcttgctttgggaacaatggctgagcatataaccataggttatggggaacaaaacaacatcaaagtcactgtatcaattgccatgaagacttgagggacctgaatctaccgattcatcttaaggcagcaggaccagtttgagtggcaacaatgcagcagcagaatcaatggaaacaacagaatgattgcaatgtccttttttttctcctgcttctgacttgataaaaggggaccgt

SEQ ID NO: 309 - DNA, 460 bp, Homo sapien
actttatagtttaggctggacattggaaaaaaaaaaaagccagaacaacatgtgatagataatatgattggctgcacacttccagactgatgaatgatgaacgtgatggactattgtatggagcacatcttcagcaagagggggaaatactcatcatttttggccagcagttgtttgatcaccaaacatcatgccagaatactcagcaaaccttcttagctcttgagaagtcaaagtccgggggaatttattcctggcaattttaattggactccttatgtgagagcagcggctacccagctggggtggtggagcgaacccgtcactagtggacatgcagtggcagagctcctggtaaccacctagaggaatacacaggcacatgtgtgatgccaagcgtgacacctgtagcactcaaatttgtcttgtttttgtctttcggtgtgtaagattcttaagt

SEQ ID NO: 310 - DNA, 539 bp, Homo sapien
acgggacttatcaaataaagataggaaaagaagaaaactcaaatattataggcagaaatgctaaaggttttaaaatatgtcaggattggaagaaggcatggataaagaacaaagttcagttaggaaagagaaacacagaaggaagagacacaataaaagtcattatgtattctgtgagaagtcagacagtaagatttgtgggaaatgggttggtttgttgtatggtatgtattttagcaataatctttatggcagagaaagctaaaatcctttagcttgcgtgaatgatcacttgctgaattcctcaaggtaggcatgatgaaggagggtttagaggagacacagacacaatgaactgacctagatagaaagccttagtatactcagctaggaatagtgattctgagggcacactgtgacatgattatgtcattacatgtatggtagtgatggggatgataggaaggaagaacttatggcatattttcacccccacaaaagtcagttaaatattgggacactaaccatccaggtcaaga

SEQ ID NO: 311 - DNA, 526 bp, Homo sapien
  misc_feature (1)...(526): n = A,T,C or G
caaatttgagccaatgacatagaattttacaaatcaagaagcttattctggggccatttcttttgacgttttctctaaactactaaagaggcattaatgatccataaattatattatctacatttacagcatttaaaatgtgttcagcatgaaatattagctacaggggaagctaaataaattaaacatggaataaagatttgtccttaaatataatctacaagaagactttgatatttgtttttcacaagtgaagcattcttataaagtgtcataacctttttggggaaactatgggaaaaaatggggaaactctgaagggttttaagtatcttacctgaagctacagactccataacctctctttacagggagctcctgcagcccctacagaaatgagtggctgagattcttgattgcacagcaagagcttctcatctaaaccctttccctttttagtatctgtgtatcaagtataaaagttctataaactgtagtntacttattttaatccccaaagcacagt

SEQ ID NO: 312 - DNA, 500 bp, Homo sapien
  misc_feature (1)...(500): n = A,T,C or G
cctctctctccccaccccctgactctagagaactgggttttctcccagtactccagcaattcatttctgaaagcagttgagccactttattccaaagtacactgcagatgttcaaactctccatttctctttcccttccacctgccagttttgctgactctcaacttgtcatgagtgtaagcattaaggacattatgcttcttcgattctgaagacaggccctgctcatggatgactctggcttcttaggaaaatatttttcttccaaaatcagtaggaaatctaaacttatcccctctttgcagatgtctagcagcttcagacatttggttaagaacccatgggaaaaaaaaaaatccttgctaatgtggtttcctttgtaaaccangattcttatttgnctggtatagaatatcagctctgaacgtgtggtaaagatttttgtgtttgaatataggagaaatcagtttgctgaaaagttagtcttaattatctattgg

SEQ ID NO: 313 - DNA, 718 bp, Homo sapien
  misc_feature (1)...(718): n = A,T,C or G
ggagatttgtgtggtttgcagccgagggagaccaggaagatctgcatggtgggaaggacctgatgatacagaggtgagaaataagaaaggctgctgactttaccatctgaggccacacatctgctgaaatggagataattaacatcactagaaacagcaagatgacaatataatgtctaagtagtgacatgtttttgcacatttccagcccttttaaatatccacacacacaggaagcacaaaaggaagcacagagatccctgggagaaatgcccggccgccatcttgggtcatcgatgagcctcgccctgtgcctgntcccgcttgtgagggaaggacattagaaaatgaattgatgtgttccttaaaggatggcaggaaaacagatcctgttgtggatatttatttgaacgggattacagatttgaaatgaagtcacaaagtgagcattaccaatgagaggaaaacagacgagaaaatcttgatggttcacaagacatgcaacaaacaaaatggaatactgtgatgacacgagcagccaactggggaggagataccacggggcagaggtcaggattctggccctgctgcctaactgtgcgttataccaatcatttctatttctaccctcaaacaagctgtngaatatctgacttacggttcttntggcccacattttcatnatccaccccntcnttttaannttantccaaantgt

SEQ ID NO: 314 - DNA, 358 bp, Homo sapien
gtttatttacattacagaaaaaacatcaagacaatgtatactatttcaaatatatccatacataatcaaatatagctgtagtacatgttttcattggtgtagattaccacaaatgcaaggcaacatgtgtagatctcttgtcttattcttttgtctataatactgtattgtgtagtccaagctctcggtagtccagccactgtgaaacatgctccctttagattaacctcgtggacgctcttgttgtattgctgaactgtagtgccctgtattttgcttctgtctgtgaattctgttgcttctggggcatttccttgtgatgcagaggaccaccacacagatgacagcaatctgaatt

SEQ ID NO: 315 - DNA, 341 bp, Homo sapien
taccacctccccgctggcactgatgagccgcatcaccatggtcaccagcaccatgaaggcataggtgatgatgaggacatggaatgggcccccaaggatggtctgtccaaagaagcgagtgacccccattctgaagatgtctggaacctctaccagcaggatgatgatagccccaatgacagtcaccagctccccgaccagccggatatcgtccttaggggtcatgtaggcttcctgaagtagcttctgctgtaagagggtgttgtcccgggggctcgtgcggttattggtcctgggcttgagggggcggtagatgcagcacatggtgaagcagatgatgt

SEQ ID NO: 316 - DNA, 151 bp, Homo sapien
agactgggcaagactcttacgccccacactgcaatttggtcttgttgccgtatccatttatgtgggcctttctcgagtttctgattataaacaccactggagcgatgtgttgactggactcattcagggagctctggttgcaatattagtt

SEQ ID NO: 317 - DNA, 151 bp, Homo sapien
agaactagtggatcctaatgaaatacctgaaacatatattggcatttatcaatggctcaaatcttcatttatctctggccttaaccctggctcctgaggctgcggccagcagatcccaggccagggctctgttcttgccacacctgcttga

SEQ ID NO: 318 - DNA, 151 bp, Homo sapien
actggtgggaggcgctgtttagttggctgttttcagaggggtctttcggagggacctcctgctgcaggctggagtgtctttattcctggcgggagaccgcacattccactgctgaggctgtgggggcggtttatcaggcagtgataaacat

SEQ ID NO: 319 - DNA, 151 bp, Homo sapien
aactagtggatccagagctataggtacagtgtgatctcagctttgcaaacacattttctacatagatagtactaggtattaatagatatgtaaagaaagaaatcacaccattaataatggtaagattgggtttatgtgattttagtgggta

SEQ ID NO: 320 - DNA, 150 bp, Homo sapien
aactagtggatccactagtccagtgtggtggaattccattgtgttggggttctagatcgcgagcggctgccctttttttttttttttttgggggggaattttttttttttaatagttattgagtgttctacagcttacagtaaataccat

SEQ ID NO: 321 - DNA, 151 bp, Homo sapien
agcaactttgtttttcatccaggttattttaggcttaggatttcctctcacactgcagtttagggtggcattgtaaccagctatggcataggtgttaaccaaaggctgagtaaacatgggtgcctctgagaaatcaaagtcttcatacact

SEQ ID NO: 322 - DNA, 151 bp, Homo sapien
  misc_feature (1)...(151): n = A,T,C or G
atccagcatcttctcctgtttcttgccttcctttttcttcttcttasattctgcttgaggtttgggcttggtcagtttgccacagggcttggagatggtgacagtcttctggcattcggcattgtgcagggctcgcttcanacttccagtt

SEQ ID NO: 323 - DNA, 151 bp, Homo sapien
  misc_feature (1)...(151): n = A,T,C or G
tgaggacttgtkttctttttctttatttttaatcctcttackttgtaaatatattgcctanagactcanttactacccagtttgtggttttwtgggagaaatgtaactggacagttagctgttcaatyaaaaagacacttancccatgtgg

SEQ ID NO: 324 - DNA, 461 bp, Homo sapien
  misc_feature (1)...(461): n = A,T,C or G
acctgtgtggaatttcagctttcctcatgcaaaaggattttgtatccccggcctacttgaagaagtggtcagctaaaggaatccaggttgttggttggactgttaatacctttgatgaaaagagttactacgaatcccatcttggttccagctatatcactgacagcatggtagaagactgcgaacctcacttctagactttcacggtgggacgaaacgggttcagaaactgccaggggcctcatacagggatatcaaaataccctttgtgctacccaggccctggggaatcaggtgactcacacaaatgcaatagttggtcactgcatttttacctgaaccaaagctaaacccggtgttgccaccatgcaccatggcatgccagagttcaacactgttgctcttgaaaattgggtctgaaaaaacgcacaagagcccctgccctgccctagctgangcac

SEQ ID NO: 325 - DNA, 400 bp, Homo sapien
acactgtttccatgttatgtttctacacattgctacctcagtgctcctggaaacttagcttttgatgtctccaagtagtccaccttcatttaactctttgaaactgtatcatctttgccaagtaagagtggtggcctatttcagctgctttgacaaaatgactggctcctgacttaacgttctataaatgaatgtgctgaagcaaagtgcccatggtggcggcgaagaagagaaagatgtgttttgttttggactctctgtggtcccttccaatgctgtgggtttccaaccaggggaagggtcccttttgcattgccaagtgccataaccatgagcactacgctaccatggttctgcctcctggccaagcaggctggtttgcaagaatgaaatgaatgat

SEQ ID NO: 326 - DNA, 1215 bp, Homo sapien
ggaggactgcagcccgcactcgcagccctggcaggcggcactggtcatggaaaacgaattgttctgctcgggcgtcctggtgcatccgcagtgggtgctgtcagccgcacactgtttccagaactcctacaccatcgggctgggcctgcacagtcttgaggccgaccaagagccagggagccagatggtggaggccagcctctccgtacggcacccagagtacaacagacccttgctcgctaacgacctcatgctcatcaagttggacgaatccgtgtccgagtctgacaccatccggagcatcagcattgcttcgcagtgccctaccgcggggaactcttgcctcgtttctggctggggtctgctggcgaacggcagaatgcctaccgtgctgcagtgcgtgaacgtgtcggtggtgtctgaggaggtctgcagtaagctctatgacccgctgtaccaccccagcatgttctgcgccggcggagggcaagaccagaaggactcctgcaacggtgactctggggggcccctgatctgcaacgggtacttgcagggccttgtgtctttcggaaaagccccgtgtggccaagttggcgtgccaggtgtctacaccaacctctgcaaattcactgagtggatagagaaaaccgtccaggccagttaactctggggactgggaacccatgaaattgacccccaaatacatcctgcggaaggaattcaggaatatctgttcccagcccctcctccctcaggcccaggagtccaggcccccagcccctcctccctcaaaccaagggtacagatccccagcccctcctccctcagacccaggagtccagaccccccagcccctcctccctcagacccaggagtccagcccctcctccctcagacccaggagtccagaccccccagcccctcctccctcagacccaggggtccaggcccccaacccctcctccctcagactcagaggtccaagcccccaacccctccttccccagacccagaggtccaggtcccagcccctcctccctcagacccagcggtccaatgccacctagactctccctgtacacagtgcccccttgtggcacgttgacccaaccttaccagttggtttttcattttttgtccctttcccctagatccagaaataaagtctaagagaagcgcaaaaaaaaaaaaaaaaaaaaaaaaaaaaaaaaaaaa

SEQ ID NO: 327 - protein, 220 aa, Homo sapien
EDCSPHSQPWQAALVMENELFCSGVLVHPQWVLSAAHCFQNSYTIGLGLHSLEADQEPGSQMVEASLSVRHPEYNRPLLANDLMLIKLDESVSESDTIRSISIASQCPTAGNSCLVSGWGLLANGRMPTVLQCVNVSVVSEEVCSKLYDPLYHPSMFCAGGGQDQKDSCNGDSGGPLICNGYLQGLVSFGKAPCGQVGVPGVYTNLCKFTEWIEKTVQAS

SEQ ID NO: 328 - DNA, 234 bp, Homo sapien
cgctcgtctctggtagctgcagccaaatcataaacggcgaggactgcagcccgcactcgcagccctggcaggcggcactggtcatggaaaacgaattgttctgctcgggcgtcctggtgcatccgcagtgggtgctgtcagccacacactgtttccagaactcctacaccatcgggctgggcctgcacagtcttgaggccgaccaagagccagggagccagatggtggaggcca

SEQ ID NO: 329 - protein, 77 aa, Homo sapien
LVSGSCSQIINGEDCSPHSQPWQAALVMENELFCSGVLVHPQWVLSATHCFQNSYTIGLGLHSLEADQEPGSQMVEA

SEQ ID NO: 330 - DNA, 70 bp, Homo sapien
cccaacacaatggcccgatcccatccctgactccgccctcaggatcgctcgtctctggtagctgcagcca

SEQ ID NO: 331 - protein, 22 aa, Homo sapien
QHNGPIPSLTPPSGSLVSGSCS

SEQ ID NO: 332 - DNA, 2507 bp, Homo sapien
tggtgccgctgcagccggcagagatggttgagctcatgttcccgctgttgctcctccttctgcccttccttctgtatatggctgcgccccaaatcaggaaaatgctgtccagtggggtgtgtacatcaactgttcagcttcctgggaaagtagttgtggtcacaggagctaatacaggtatcgggaaggagacagccaaagagctggctcagagaggagctcgagtatatttagcttgccgggatgtggaaaagggggaattggtggccaaagagatccagaccacgacagggaaccagcaggtgttggtgcggaaactggacctgtctgatactaagtctattcgagcttttgctaagggcttcttagctgaggaaaagcacctccacgttttgatcaacaatgcaggagtgatgatgtgtccgtactcgaagacagcagatggctttgagatgcacataggagtcaaccacttgggtcacttcctcctaacccatctgctgctagagaaactaaaggaatcagccccatcaaggatagtaaatgtgtcttccctcgcacatcacctgggaaggatccacttccataacctgcagggcgagaaattctacaatgcaggcctggcctactgtcacagcaagctagccaacatcctcttcacccaggaactggcccggagactaaaaggctctggcgttacgacgtattctgtacaccctggcacagtccaatctgaactggttcggcactcatctttcatgagatggatgtggtggcttttctcctttttcatcaagactcctcagcagggagcccagaccagcctgcactgtgccttaacagaaggtcttgagattctaagtgggaatcatttcagtgactgtcatgtggcatgggtctctgcccaagctcgtaatgagactatagcaaggcggctgtgggacgtcagttgtgacctgctgggcctcccaatagactaacaggcagtgccagttggacccaagagaagactgcagcagactacacagtacttcttgtcaaaatgattctccttcaaggttttcaaaacctttagcacaaagagagcaaaaccttccagccttgcctgcttggtgtccagttaaaactcagtgtactgccagattcgtctaaatgtctgtcatgtccagatttactttgcttctgttactgccagagttactagagatatcataataggataagaagaccctcatatgacctgcacagctcattttccttctgaaagaaactactacctaggagaatctaagctatagcagggatgatttatgcaaatttgaactagcttctttgttcacaattcagttcctcccaaccaaccagtcttcacttcaagagggccacactgcaacctcagcttaacatgaataacaaagactggctcaggagcagggcttgcccaggcatggtggatcaccggaggtcagtagttcaagaccagcctggccaacatggtgaaaccccacctctactaaaaattgtgtatatctttgtgtgtcttcctgtttatgtgtgccaagggagtattttcacaaagttcaaaacagccacaataatcagagatggagcaaaccagtgccatccagtctttatgcaaatgaaatgctgcaaagggaagcagattctgtatatgttggtaactacccaccaagagcacatgggtagcagggaagaagtaaaaaaagagaaggagaatactggaagataatgcacaaaatgaagggactagttaaggattaactagccctttaaggattaactagttaaggattaatagcaaaagayattaaatatgctaacatagctatggaggaattgagggcaagcacccaggactgatgaggtcttaacaaaaaccagtgtggcaaaaaaaaaaaaaaaaaaaaaaaaaaatcctaaaaacaaacaaacaaaaaaaacaattcttcattcagaaaaattatcttagggactgatattggtaattatggtcaatttaataatattttggggcatttccttacattgtcttgacaagattaaaatgtctgtgccaaaattttgtattttatttggagacttcttatcaaaagtaatgctgccaaaggaagtctaaggaattagtagtgttcccatcacttgtttggagtgtgctattctaaaagattttgatttcctggaatgacaattatattttaactttggtgggggaaagagttataggaccacagtcttcacttctgatacttgtaaattaatcttttattgcacttgttttgaccattaagctatatgtttagaaatggtcattttacggaaaaattagaaaaattctgataatagtgcagaataaatgaattaatgttttacttaatttatattgaactgtcaatgacaaataaaaattctttttgattattttttgttttcatttaccagaataaaaacgtaagaattaaaagtttgattacaaaaaaaaaaaaaaa

SEQ ID NO: 333 - DNA, 3030 bp, Homo sapien
gcaggcgacttgcgagctgggagcgatttaaaacgctttggattcccccggcctgggtggggagagcgagctgggtgccccctagattccccgcccccgcacctcatgagccgaccctcggctccatggagcccggcaattatgccaccttggatggagccaaggatatcgaaggcttgctgggagcgggaggggggcggaatctggtcgcccactcccctctgaccagccacccagcggcgcctacgctgatgcctgctgtcaactatgcccccttggatctgccaggctcggcggagccgccaaagcaatgccacccatgccctggggtgccccaggggacgtccccagctcccgtgccttatggttactttggaggcgggtactactcctgccgagtgtcccggagctcgctgaaaccctgtgcccaggcagccaccctggccgcgtaccccgcggagactcccacggccggggaagagtaccccagycgccccactgagtttgccttctatccgggatatccgggaacctaccagcctatggccagttacctggacgtgtctgtggtgcagactctgggtgctcctggagaaccgcgacatgactccctgttgcctgtggacagttaccagtcttgggctctcgctggtggctggaacagccagatgtgttgccagggagaacagaacccaccaggtcccttttggaaggcagcatttgcagactccagcgggcagcaccctcctgacgcctgcgcctttcgtcgcggccgcaagaaacgcattccgtacagcaaggggcagttgcgggagctggagcgggagtatgcggctaacaagttcatcaccaaggacaagaggcgcaagatctcggcagccaccagcctctcggagcgccagattaccatctggtttcagaaccgccgggtcaaagagaagaaggttctcgccaaggtgaagaacagcgctaccccttaagagatctccttgcctgggtgggaggagcgaaagtgggggtgtcctggggagaccaggaacctgccaagcccaggctggggccaaggactctgctgagaggcccctagagacaacacccttcccaggccactggctgctggactgttcctcaggagcggcctgggtacccagtatgtgcagggagacggaaccccatgtgacagcccactccaccagggttcccaaagaacctggcccagtcataatcattcatcctgacagtggcaataatcacgataaccagtactagctgccatgatcgttagcctcatattttctatctagagctctgtagagcactttagaaaccgctttcatgaattgagctaattatgaataaatttggaaggcgatccctttgcagggaagctttctctcagacccccttccattacacctctcaccctggtaacagcaggaagactgaggagaggggaacgggcagattcgttgtgtggctgtgatgtccgtttagcatttttctcagctgacagctgggtaggtggacaattgtagaggctgtctcttcctccctccttgtccaccccatagggtgtacccactggtcttggaagcacccatccttaatacgatgatttttctgtcgtgtgaaaatgaagccagcaggctgcccctagtcagtccttccttccagagaaaaagagatttgagaaagtgcctgggtaattcaccattaatttcctcccccaaactctctgagtcttcccttaatatttctggtggttctgaccaaagcaggtcatggtttgttgagcatttgggatcccagtgaagtagatgtttgtagccttgcatacttagcccttcccaggcacaaacggagtggcagagtggtgccaaccctgttttcccagtccacgtagacagattcacagtgcggaattctggaagctggagacagacgggctctttgcagagccgggactctgagagggacatgagggcctctgcctctgtgttcattctctgatgtcctgtacctgggctcagtgcccggtgggactcatctcctggccgcgcagcaaagccagcgggttcgtgctggtccttcctgcaccttaggctgggggtggggggcctgccggcgcattctccacgattgagcgcacaggcctgaagtctggacaacccgcagaaccgaagctccgagcagcgggtcggtggcgagtagtggggtcggtggcgagcagttggtggtgggccgcggccgccactacctcgaggacatttccctcccggagccagctctcctagaaaccccgcggcggccgccgcagccaagtgtttatggcccgcggtcgggtgggatcctagccctgtctcctctcctgggaaggagtgagggtgggacgtgacttagacacctacaaatctatttaccaaagaggagcccgggactgagggaaaaggccaaagagtgtgagtgcatgcggactgggggttcaggggaagaggacgaggaggaggaagatgaggtcgatttcctgatttaaaaaatcgtccaagccccgtggtccagcttaaggtcctcggttacatgcgccgctcagagcaggtcactttctgccttccacgtcctccttcaaggaagccccatgtgggtagctttcaatatcgcaggttcttactcctctgcctctataagctcaaacccaccaacgatcgggcaagtaaaccccctccctcgccgacttcggaactggcgagagttcagcgcagatgggcctgtggggagggggcaagatagatgagggggagcggcatggtgcggggtgaccccttggagagaggaaaaaggccacaagaggggctgccaccgccactaacggagatggccctggtagagacctttgggggtctggaacctctggactccccatgctctaactcccacactctgctatcagaaacttaaacttgaggattttctctgtttttcactcgcaataaaytcagagcaaacaaaaaaaaaaaaaaaaaaaaactcgag

SEQ ID NO: 334 - DNA, 2417 bp, Homo sapien
ggcggccgctctagagctagtgggatcccccgggctgcacgaattcggcacgagtgagttggagttttacctgtattgttttaatttcaacaagcctgaggactagccacaaatgtacccagtttacaaatgaggaaacaggtgcaaaaaggttgttacctgtcaaaggtcgtatgtggcagagccaagatttgagcccagttatgtctgatgaacttagcctatgctctttaaacttctgaatgctgaccattgaggatatctaaacttagatcaattgcattttccctccaagactatttacttatcaatacaataataccacctttaccaatctattgttttgatacgagactcaaatatgccagatatatgtaaaagcaacctacaagctctctaatcatgctcacctaaaagattcccgggatctaataggctcaaagaaacttcttctagaaatataaaagagaaaattggattatgcaaaaattcattattaatttttttcatccatcctttaattcagcaaacatttatctgttgttgactttatgcagtatggccttttaaggattgggggacaggtgaagaacggggtgccagaatgcatcctcctactaatgaggtcagtacacatttgcattttaaaatgccctgtccagctgggcatggtggatcatgcctgtaatctcaacattggaaggccaaggcaggaggattgcttcagcccaggagttcaagaccagcctgggcaacatagaaagaccccatctctcaatcaatcaatcaatgccctgtctttgaaaataaaactctttaagaaaggtttaatgggcagggtgtggtagctcatgcctataatacagcactttgggaggctgaggcaggaggatcactttagcccagaagttcaagaccagcctgggcaacaagtgacacctcatctcaattttttaataaaatgaatacatacataaggaaagataaaaagaaaagtttaatgaaagaatacagtataaaacaaatctcttggacctaaaagtatttttgttcaagccaaatattgtgaatcacctctctgtgttgaggatacagaatatctaagcccaggaaactgagcagaaagttcatgtactaactaatcaacccgaggcaaggcaaaaatgagactaactaatcaatccgaggcaaggggcaaattagacggaacctgactctggtctattaagcgacaactttccctctgttgtatttttcttttattcaatgtaaaaggataaaaactctctaaaactaaaaacaatgtttgtcaggagttacaaaccatgaccaactaattatggggaatcataaaatatgactgtatgagatcttgatggtttacaaagtgtacccactgttaatcactttaaacattaatgaacttaaaaatgaatttacggagattggaatgtttctttcctgttgtattagttggctcaggctgccataacaaaataccacagactgggaggcttaagtaacagaaattcatttctcacagttctgggggctggaagtccacgatcaaggtgcaggaaaggcaggcttcattctgaggcccctctcttggctcacatgtggccaccctcccactgcgtgctcacatgacctctttgtgctcctggaaagagggtgtgggggacagagggaaagagaaggagagggaactctctggtgtctcgtctttcaaggaccctaacctgggccactttggcccaggcactgtggggtggggggttgtggctgctctgctctgagtggccaagataaagcaacagaaaaatgtccaaagctgtgcagcaaagacaagccaccgaacagggatctgctcatcagtgtggggacctccaagtcggccaccctggaggcaagcccccacagagcccatgcaaggtggcagcagcagaagaagggaattgtccctgtccttggcacattcctcaccgacctggtgatgctggacactgcgatgaatggtaatgtggatgagaatatgatggactcccagaaaaggagacccagctgctcaggtggctgcaaatcattacagccttcatcctggggaggaactgggggcctggttctgggtcagagagcagcccagtgagggtgagagctacagcctgtcctgccagctggatccccagtcccggtcaaccagtaatcaaggctgagcagatcaggcttcccggagctggtcttgggaagccagccctggggtgagttggctcctgctgtggtactgagacaatattgtcataaattcaatgcgcccttgtatccctttttcttttttatctgtctacatctataatcactatgcatactagtctttgttagtgtttctattcmacttaatagagatatgttatact

SEQ ID NO: 335 - DNA, 2984 bp, Homo sapien
atccctccttccccactctcctttccagaaggcacttggggtcttatctgttggactctgaaaacacttcaggcgcccttccaaggcttccccaaacccctaagcagccgcagaagcgctcccgagctgccttctcccacactcaggtgatcgagttggagaggaagttcagccatcagaagtacctgtcggcccctgaacgggcccacctggccaagaacctcaagctcacggagacccaagtgaagatatggttccagaacagacgctataagactaagcgaaagcagctctcctcggagctgggagacttggagaagcactcctctttgccggccctgaaagaggaggccttctcccgggcctccctggtctccgtgtataacagctatccttactacccatacctgtactgcgtgggcagctggagcccagctttttggtaatgccagctcaggtgacaaccattatgatcaaaaactgccttccccagggtgtctctatgaaaagcacaaggggccaaggtcagggagcaagaggtgtgcacaccaaagctattggagatttgcgtggaaatctcasattcttcactggtgagacaatgaaacaacagagacagtgaaagttttaatacctaagtcattcccccagtgcatactgtaggtcattttttttgcttctggctacctgtttgaaggggagagagggaaaatcaagtggtattttccagcactttgtatgattttggatgagctgtacacccaaggattctgttctgcaactccatcctcctgtgtcactgaatatcaactctgaaagagcaaacctaacaggagaaaggacaaccaggatgaggatgtcaccaactgaattaaacttaagtccagaagcctcctgttggccttggaatatggccaaggctctctctgtccctgtaaaagagaggggcaaatagagagtctccaagagaacgccctcatgctcagcacatatttgcatgggagggggagatgggtgggaggagatgaaaatatcagcttttcttattcctttttattccttttaaaatggtatgccaacttaagtatttacagggtggcccaaatagaacaagatgcactcgctgtgattttaagacaagctgtataaacagaactccactgcaagagggggggccgggccaggagaatctccgcttgtccaagacaggggcctaaggagggtctccacactgctgctaggggctgttgcatttttttattagtagaaagtggaaaggcctcttctcaacttttttcccttgggctggagaatttagaatcagaagtttcctggagttttcaggctatcatatatactgtatcctgaaaggcaacataattcttccttccctccttttaaaattttgtgttcctttttgcagcaattactcactaaagggcttcattttagtccagatttttagtctggctgcacctaacttatgcctcgcttatttagcccgagatctggtctttttttttttttttttttttccgtctccccaaagctttatctgtcttgactttttaaaaaagtttgggggcagattctgaattggctaaaagacatgcatttttaaaactagcaactcttatttctttcctttaaaaatacatagcattaaatcccaaatcctatttaaagacctgacagcttgagaaggtcactactgcatttataggaccttctggtggttctgctgttacgtttgaagtctgacaatccttgagaatctttgcatgcagaggaggtaagaggtattggattttcacagaggaagaacacagcgcagaatgaagggccaggcttactgagctgtccagtggagggctcatgggtgggacatggaaaagaaggcagcctaggccctggggagcccagtccactgagcaagcaagggactgagtgagccttttgcaggaaaaggctaagaaaaaggaaaaccattctaaaacacaacaagaaactgtccaaatgctttgggaactgtgtttattgcctataatgggtccccaaaatgggtaacctagacttcagagagaatgagcagagagcaaaggagaaatctggctgtccttccattttcattctgttatctcaggtgagctggtagaggggagacattagaaaaaaatgaaacaacaaaacaattactaatgaggtacgctgaggcctgggagtctcttgactccactacttaattccgtttagtgagaaacctttcaattttcttttattagaagggccagcttactgttggtggcaaaattgccaacataagttaatagaaagttggccaatttcaccccattttctgtggtttgggctccacattgcaatgttcaatgccacgtgctgctgacaccgaccggagtactagccagcacaaaaggcagggtagcctgaattgctttctgctctttacatttcttttaaaataagcatttagtgctcagtccctactgagtactctttctctcccctcctctgaatttaattctttcaacttgcaatttgcaaggattacacatttcactgtgatgtatattgtgttgcaaaaaaaaaaaaaagtgtctttgtttaaaattacttggtttgtgaatccatcttgctttttccccattggaactagtcattaacccatctctgaactggtagaaaaacatctgaagagctagtctatcagcatctgacaggtgaattggatggttctcagaaccatttcacccagacagcctgtttctatcctgtttaataaattagtttgggttctctacatgcataacaaaccctgctccaatctgtcacataaaagtctgtgacttgaagtttagtcagcacccccaccaaactttatttttctatgtgttttttgcaacatatgagtgttttgaaaataaagtacccatgtctttattagaaaaaaaaaaaaaaaaaaaaaa

SEQ ID NO: 336 - protein, 147 aa, Homo sapien
PSFPTLLSRRHLGSYLLDSENTSGALPRLPQTPKQPQKRSRAAFSHTQVIELERKFSHQKYLSAPERAHLAKNLKLTETQVKIWFQNRRYKTKRKQLSSELGDLEKHSSLPALKEEAFSRASLVSVYNSYPYYPYLYCVGSWSPAFW

SEQ ID NO: 337 - protein, 9 aa, Homo sapien
ALTGFTFSA

SEQ ID NO: 338 - protein, 9 aa, Homo sapien
LLANDLMLI

SEQ ID NO: 339 - protein, 318 aa, Homo sapien
MVELMFPLLLLLLPFLLYMAAPQIRKMLSSGVCTSTVQLPGKVVVVTGANTGIGKETAKELAQRGARVYLACRDVEKGELVAKEIQTTTGNQQVLVRKLDLSDTKSIRAFAKGFLAEEKHLHVLINNAGVMMCPYSKTADGFEMHIGVNHLGHFLLTHLLLEKLKESAPSRIVNVSSLAHHLGRIHFHNLQGEKFYNAGLAYCHSKLANILFTQELARRLKGSGVTTYSVHPGTVQSELVRHSSFMRWMWWLFSFFIKTPQQGAQTSLHCALTEGLEILSGNHFSDCHVAWVSAQARNETIARRLWDVSCDLLGLPID

SEQ ID NO: 340 - DNA, 483 bp, Homo sapien
gccgaggtctgccttcacacggaggacacgagactgcttcctcaagggctcctgcctgcctggacactggtgggaggcgctgtttagttggctgttttcagaggggtctttcggagggacctcctgctgcaggctggagtgtctttattcctggcgggagaccgcacattccactgctgaggttgtgggggcggtttatcaggcagtgataaacataagatgtcatttccttgactccggccttcaattttctctttggctgacgacggagtccgtggtgtcccgatgtaactgacccctgctccaaacgtgacatcactgatgctcttctcgggggtgctgatggcccgcttggtcacgtgctcaatctcgccattcgactcttgctccaaactgtatgaagacacctgactgcacgttttttctgggcttccagaatttaaagtgaaaggcagcactcctaagctccgactccgatgcctg

SEQ ID NO: 341 - DNA, 344 bp, Homo sapien
ctgctgctgagtcacagatttcattataaatagcctccctaaggaaaatacactgaatgctatttttactaaccattctatttttatagaaatagctgagagtttctaaaccaactctctgctgccttacaagtattaaatattttacttctttccataaagagtagctcaaaatatgcaattaatttaataatttctgatgatggttttatctgcagtaatatgtatatcatctattagaatttacttaatgaaaaactgaagagaacaaaatttgtaaccactagcacttaagtactcctgattcttaacattgtctttaatgaccacaagacaaccaacag

SEQ ID NO: 342 - DNA, 592 bp, Homo sapien
acagcaaaaaagaaactgagaagcccaatytgctttcttgttaacatccacttatccaaccaatgtggaaacttcttatacttggttccattatgaagttggacaattgctgctatcacacctggcaggtaaaccaatgccaagagagtgatggaaaccattggcaagactttgttgatgaccaggattggaattttataaaaatattgttgatgggaagttgctaaagggtgaattacttccctcagaagagtgtaaagaaaagtcagagatgctataatagcagctattttaattggcaagtgccactgtggaaagagttcctgtgtgtgctgaagttctgaagggcagtcaaattcatcagcatgggctgtttggtgcaaatgcaaaagcacaggtctttttagcatgctggtctctcccgtgtccttatgcaaataatcgtcttcttctaaatttctcctaggcttcattttccaaagttcttcttggtttgtgatgtcttttctgctttccattaattctataaaatagtatggcttcagccacccactcttcgccttagcttgaccgtgagtctcggctgccgctg

SEQ ID NO: 343 - DNA, 382 bp, Homo sapien
ttcttgacctcctcctccttcaagctcaaacaccacctcccttattcaggaccggcacttcttaatgtttgtggctttctctccagcctctcttaggaggggtaatggtggagttggcatcttgtaactctcctttctcctttcttcccctttctctgcccgcctttcccatcctgctgtagacttcttgattgtcagtctgtgtcacatccagtgattgttttggtttctgttccctttctgactgcccaaggggctcagaaccccagcaatcccttcctttcactaccttcttttttgggggtagttggaagggactgaaattgtggggggaaggtaggaggcacatcaataaagaggaaaccaccaagctgaaaaaaaa

SEQ ID NO: 344 - DNA, 536 bp, Homo sapien
ctgggcctgaagctgtagggtaaatcagaggcaggcttctgagtgatgagagtcctgagacaataggccacataaacttggctggatggaacctcacaataaggtggtcacctcttgtttgtttagggggatgccaaggataaggccagctcagttatatgaagagaagcagaacaaacaagtctttcagagaaatggatgcaatcagagtgggatcccggtcacatcaaggtcacactccaccttcatgtgcctgaatggttgccaggtcagaaaaatccaccccttacgagtgcggcttcgaccctatatcccccgcccgcgtccctttctccataaaattcttcttagtagctattaccttcttattatttgatctagaaattgccctccttttacccctaccatgagccctacaaacaactaacctgccactaatagttatgtcatccctcttattaatcatcatcctagccctaagtctggcctatgagtgactacaaaaaggattagactgagccgaataacaaaaaaaa

SEQ ID NO: 345 - DNA, 251 bp, Homo sapien
accttttgaggtctctctcaccacctccacagccaccgtcaccgtgggatgtgctggatgtgaatgaagcccccatctttgtgcctcctgaaaagagagtggaagtgtccgaggactttggcgtgggccaggaaatcacatcctacactgcccaggagccagacacatttatggaacagaaaataacatatcggatttggagagacactgccaactggctggagattaatccggacactggtgccatttcc

SEQ ID NO: 346 - DNA, 282 bp, Homo sapien
  misc_feature (1)...(282): n = A,T,C or G
cgcgtctctgacactgtgatcatgacaggggttcaaacagaaagtgcctgggccctccttctaagtcttgttaccaaaaaaaggaaaaagaaaagatcttctcagttacaaattctgggaagggagactatacctggctcttgccctaagtgagaggtcttccctcccgcaccaaaaaatagaaaggctttctatttcactggcccaggtagggggaaggagagtaactttgagtctgtgggtctcatttcccaaggtgccttcaatgctcatnaaaaccaa

SEQ ID NO: 347 - DNA, 201 bp, Homo sapien
  misc_feature (1)...(201): n = A,T,C or G
acacacataatattataaaatgccatctaattggaaggagctttctatcattgcaagtcataaatataacttttaaaanantactancagcttttacctangctcctaaatgcttgtaaatctgagactgactggacccacccagacccagggcaaagatacatgttaccatatcatctttataaagaatttttttttgtc

SEQ ID NO: 348 - DNA, 251 bp, Homo sapien
ctgttaatcacaacatttgtgcatcacttgtgccaagtgagaaaatgttctaaaatcacaagagagaacagtgccagaatgaaactgaccctaagtcccaggtgcccctgggcaggcagaaggagacactcccagcatggaggagggtttatcttttcatcctaggtcaggtctacaatgggggaaggttttattatagaactcccaacagcccacctcactcctgccacccacccgatggccctgcctcc

SEQ ID NO: 349 - DNA, 251 bp, Homo sapien
taaaaatcaagccatttaattgtatctttgaaggtaaacaatatatgggagctggatcacaacccctgaggatgccagagctatgggtccagaacatggtgtggtattatcaacagagttcagaagggtctgaactctacgtgttaccagagaacataatgcaattcatgcattccacttagcaattttgtaaaataccagaaacagaccccaagagtctttcaagatgaggaaaattcaactcctggttt

SEQ ID NO: 350 - DNA, 908 bp, Homo sapien
ctggacactttgcgagggcttttgctggctgctgctgctgcccgtcatgctactcatcgtagcccgcccggtgaagctcgctgctttccctacctccttaagtgactgccaaacgcccaccggctggaattgctctggttatgatgacagagaaaatgatctcttcctctgtgacaccaacacctgtaaatttgatggggaatgtttaagaattggagacactgtgacttgcgtctgtcagttcaagtgcaacaatgactatgtgcctgtgtgtggctccaatggggagagctaccagaatgagtgttacctgcgacaggctgcatgcaaacagcagagtgagatacttgtggtgtcagaaggatcatgtgccacagtccatgaaggctctggagaaactagtcaaaaggagacatccacctgtgatatttgccagtttggtgcagaatgtgacgaagatgccgaggatgtctggtgtgtgtgtaatattgactgttctcaaaccaacttcaatcccctctgcgcttctgatgggaaatcttatgataatgcatgccaaatcaaagaagcatcgtgtcagaaacaggagaaaattgaagtcatgtctttgggtcgatgtcaagataacacaactacaactactaagtctgaagatgggcattatgcaagaacagattatgcagagaatgctaacaaattagaagaaagtgccagagaacaccacataccttgtccggaacattacaatggcttctgcatgcatgggaagtgtgagcattctatcaatatgcaggagccatcttgcaggtgtgatgctggttatactggacaacactgtgaaaaaaaggactacagtgttctatacgttgttcccggtcctgtacgatttcagtatgtcttaatcgcag

SEQ ID NO: 351 - DNA, 472 bp, Homo sapien
ccagttatttgcaagtggtaagagcctatttaccataaataatactaagaaccaactcaagtcaaaccttaatgccattgttattgtgaattaggattaagtagtaattttcaaaattcacattaacttgattttaaaatcagwtttgygagtcatttaccacaagctaaatgtgtacactatgataaaaacaaccattgtattcctgtttttctaaacagtcctaatttctaacactgtatatatccttcgacatcaatgaactttgttttcttttactccagtaataaagtaggcacagatctgtccacaacaaacttgccctctcatgccttgcctctcaccatgctctgctccaggtcagcccccttttggcctgtttgttttgtcaaaaacctaatctgcttcttgcttttcttggtaatatatatttagggaagatgttgctttgcccacacacgaagcaaagtaa

SEQ ID NO: 352 - DNA, 251 bp, Homo sapien
ctcaaagctaatctctcgggaatcaaaccagaaaagggcaaggatcttaggcatggtggatgtggataaggccaggtcaatggctgcaagcatgcagagaaagaggtacatcggagcgtgcaggctgcgttccgtccttacgatgaagaccacgatgcagtttccaaacattgccactacatacatggaaaggagggggaagccaacccagaaatgggctttctctaatcctgggataccaataagcacaa

SEQ ID NO: 353 - DNA, 436 bp, Homo sapien
ttttttttttttttttttttttttttacaacaatgcagtcatttatttattgagtatgtgcacattatggtattattactatactgattatatttatcatgtgacttctaattaraaaatgtatccaaaagcaaaacagcagatatacaaaattaaagagacagaagatagacattaacagataaggcaacttatacattgacaatccaaatccaatacatttaaacatttgggaaatgagggggacaaatggaagccaratcaaatttgtgtaaaactattcagtatgtttcccttgcttcatgtctgaraaggctctcccttcaatggggatgacaaactccaaatgccacacaaatgttaacagaatactagattcacactggaacgggggtaaagaagaaattattttctataaaagggctcctaatgtagt

SEQ ID NO: 354 - DNA, 854 bp, Homo sapien
ccttttctagttcaccagttttctgcaaggatgctggttagggagtgtctgcaggaggagcaagtctgaaaccaaatctaggaaacataggaaacgagccaggcacagggctggtgggccatcagggaccaccctttgggttgatattttgcttaatctgcatcttttgagtaagatcatctggcagtagaagctgttctccaggtacatttctctagctcatgtacaaaaacatcctgaaggactttgtcaggtgccttgctaaaagccagatgcgttcggcacttccttggtctgaggttaattgcacacctacaggcactgggctcatgctttcaagtattttgtcctcactttagggtgagtgaaagatccccattataggagcacttgggagagatcatataaaagctgactcttgagtacatgcagtaatggggtagatgtgtgtggtgtgtcttcattcctgcaagggtgcttgttagggagtgtttccaggaggaacaagtctgaaaccaatcatgaaataaatggtaggtgtgaactggaaaactaattcaaaagagagatcgtgatatcagtgtggttgatacaccttggcaatatggaaggctctaatttgcccatatttgaaataataattcagctttttgtaatacaaaataacaaaggattgagaatcatggtgtctaatgtataaaagacccaggaaacataaatatatcaactgcataaatgtaaaatgcatgtgacccaagaaggccccaaagtggcagacaacattgtacccattttcccttccaaaatgtgagcggcgggcctgctgctttcaaggctgtcacacgggatgtcag

SEQ ID NO: 355 - DNA, 676 bp, Homo sapien
gaaattaagtatgagctaaattccctgttaaaacctctaggggtgacagatctcttcaaccaggtcaaagctgatctttctggaatgtcaccaaccaagggcctatatttatcaaaagccatccacaagtcatacctggatgtcagcgaagagggcacggaggcagcagcagccactggggacagcatcgctgtaaaaagcctaccaatgagagctcagttcaaggcgaaccaccccttcctgttctttataaggcacactcataccaacacgatcctattctgtggcaagcttgcctctccctaatcagatggggttgagtaaggctcagagttgcagatgaggtgcagagacaatcctgtgactttcccacggccaaaaagctgttcacacctcacgcacctctgtgcctcagtttgctcatctgcaaaataggtctaggatttcttccaaccatttcatgagttgtgaagctaaggctttgttaatcatggaaaaaggtagacttatgcagaaagcctttctggctttcttatctgtggtgtctcatttgagtgctgtccagtgacatgatcaagtcaatgagtaaaattttaagggattagattttcttgacttgtatgtatctgtgagatcttgaataagtgacctgacatctctgcttaaagaaaaccag

SEQ ID NO: 356 - DNA, 574 bp, Homo sapien
tttttttttttttttcaggaaaacattctcttactttatttgcatctcagcaaaggttctcatgtggcacctgactggcatcaaaccaaagttcgtaggccaacaaagatgggccactcacaagcttcccatttgtagatctcagtgcctatgagtatctgacacctgttcctctcttcagtctcttagggaggcttaaatctgtctcaggtgtgctaagagtgccagcccaaggkggtcaaaagtccacaaaactgcagtctttgctgggatagtaagccaagcagtgcctggacagcagagttcttttcttgggcaacagataaccagacaggactctaatcgtgctcttattcaacattcttctgtctctgcctagactggaataaaaagccaatctctctcgtggcacagggaaggagatacaagctcgtttacatgtgatagatctaacaaaggcatctaccgaagtctggtctggatagacggcacagggagctcttaggtcagcgctgctggttggaggacattcctgagtccagctttgcagcctttgtgcaacagtactttccca

SEQ ID NO: 357 - DNA, 393 bp, Homo sapien
tttttttttttttttttttttttttttttttacagaatataratgctttatcactgkacttaatatggkgkcttgttcactatacttaaaaatgcaccactcataaatatttaattcagcaagccacaaccaaracttgattttatcaacaaaaacccctaaatataaacggsaaaaaagatagatataattattccagtttttttaaaacttaaaaratattccattgccgaattaaraaraarataagtgttatatggaaagaagggcattcaagcacactaaaraaacctgaggkaagcataatctgtacaaaattaaactgtcctttttggcattttaacaaatttgcaacgktcttttttttctttttctgtttttttttttttttac

SEQ ID NO: 358 - DNA, 630 bp, Homo sapien
acagggtaaacaggaggatccttgctctcacggagcttacattctagcaggaggacaatattaatgtttataggaaaatgatgagtttatgacaaaggaagtagatagtgttttacaagagcatagagtagggaagctaatccagcacagggaggtcacagagacatccctaaggaagtggagtttaaactgagagaagcaagtgcttaaactgaaggatgtgttgaagaagaagggagagtagaacaatttgggcagagggaaccttatagaccctaaggtgggaaggttcaaagaactgaaagagagctagaacagctggagccgttctccggtgtaaagaggagtcaaagagataagattaaagatgtgaagattaagatcttggtggcattcagggattggcacttctacaagaaatcactgaagggagtaatgtgacattacttttcacttcaggatggccattctaactccagggggtagactggactaggtaagactggaggcaggtagacctcttctaaggcctgcgatagtgaaagacaaaaataagtggggaaattcaggggatagtgaaaatcagtaggacttaatgagcaagccagaggttcctccacaacaaccagt

SEQ ID NO: 359 - DNA, 620 bp, Homo sapien
acagcattccaaaatatacatctagagactaarrgtaaatgctctatagtgaagaagtaataattaaaaaatgctactaatatagaaaatttataatcagaaaaataaatattcagggagctcaccagaagaataaagtgctctgccagttattaaaggattactgctggtgaattaaatatggcattccccaagggaaatagagagattcttctggattatgttcaatatttatttcacaggattaactgttttaggaacagatataaagcttcgccacggaagagatggacaaagcacaaagacaacatgataccttaggaagcaacactaccctttcaggcataaaatttggagaaatgcaacattatgcttcatgaataatatgtagaaagaaggtctgatgaaaatgacatccttaatgtaagataactttataagaattctgggtcaaataaaattctttgaagaaaacatccaaatgtcattgacttatcaaatactatcttggcatataacctatgaaggcaaaactaaacaaacaaaaagctcacaccaaacaaaaccatcaacttattttgtattctataacatacgagactgtaaagatgtgacagtgt

SEQ ID NO: 360 - DNA, 431 bp, Homo sapien
aaaaaaaaaaagccagaacaacatgtgatagataatatgattggctgcacacttccagactgatgaatgatgaacgtgatggactattgtatggagcacatcttcagcaagagggggaaatactcatcatttttggccagcagttgtttgatcaccaaacatcatgccagaatactcagcaaaccttcttagctcttgagaagtcaaagtccgggggaatttattcctggcaattttaattggactccttatgtgagagcagcggctacccagctggggtggtggagcgaacccgtcactagtggacatgcagtggcagagctcctggtaaccacctagaggaatacacaggcacatgtgtgatgccaagcgtgacacctgtagcactcaaatttgtcttgtttttgtctttcggtgtgtagattcttagt

SEQ ID NO: 361 - DNA, 351 bp, Homo sapien
acactgatttccgatcaaaagaatcatcatctttaccttgacttttcagggaattactgaactttcttctcagaagatagggcacagccattgccttggcctcacttgaagggtctgcatttgggtcctctggtctcttgccaagtttcccagccactcgagggagaaatatcgggaggtttgacttcctccggggctttcccgagggcttcaccgtgagccctgcggccctcagggctgcaatcctggattcaatgtctgaaacctcgctctctgcctgctggacttctgaggccgtcactgccactctgtcctccagctctgacagctcctcatctgtggtcctgttgt

SEQ ID NO: 362 - DNA, 463 bp, Homo sapien
acttcatcaggccataatgggtgcctcccgtgagaatccaagcacctttggactgcgcgatgtagatgagccggctgaagatcttgcgcatgcgcggcttcagggcgaagttcttggcgcccccggtcacagaaatgaccaggttgggtgttttcaggtgccagtgctgggtcagcagctcgtaaaggatttccgcgtccgtgtcgcaggacagacgtatatacttccctttcttccccagtgtctcaaactgaatatccccaaaggcgtcggtaggaaattccttggtgtgtttcttgtagttccatttctcactttggttgatctgggtgccttccatgtgctggctctgggcatagccacacttgcacacattctccctgataagcacgatggtgtggacaggaaggaaggatttcattgagcctgcttatggaaactggtattgttagcttaaatagac

SEQ ID NO: 363 - DNA, 653 bp, Homo sapien
  misc_feature (1)...(653): n = A,T,C or G
acccccgagtncctgnctggcatactgngaacgaccaacgacacacccaagctcggcctcctcttggngattctgggtgacatcttcatgaatggcaaccgtgccagwgaggctgtcctctgggaggcactacgcaagatgggactgcgtcctggggtgagacatcctctccttggagatctaacgaaacttctcacctatgagttgtaaagcagaaatacctgnactacagacgagtgcccaacagcaaccccccggaagtatgagttcctctrgggcctccgttcctaccatgagasctagcaagatgnaagtgttgagantcattgcagaggttcagaaaagagacccntcgtgactggtctgcacagttcatggaggctgcagatgaggccttggatgctctggatgctgctgcagctgaggccgaagcccgggctgaagcaagaacccgcatgggaattggagatgaggctgtgtntgggccctggagctgggatgacattgagtttgagctgctgacctgggatgaggaaggagattttggagatccntggtccagaattccatttaccttctgggccagataccaccagaatgcccgctccagattccctcagacctttgccggtcccattattggtcstggtggt

SEQ ID NO: 364 - DNA, 401 bp, Homo sapien
actagaggaaagacgttaaaccactctactaccacttgtggaactctcaaagggtaaatgacaaagccaatgaatgactctaaaaacaatatttacatttaatggtttgtagacaataaaaaaacaaggtggatagatctagaattgtaacattttaagaaaaccatagcatttgacagatgagaaagctcaattatagatgcaaagttataactaaactactatagtagtaaagaaatacatttcacacccttcatataaattcactatcttggcttgaggcactccataaaatgtatcacgtgcatagtaaatctttatatttgctatggcgttgcactagaggacttggactgcaacaagtggatgcgcggaaaatgaaatcttcttcaatagcccag

SEQ ID NO: 365 - DNA, 356 bp, Homo sapien
ccagtgtcatatttgggcttaaaatttcaagaagggcacttcaaatggctttgcatttgcatgtttcagtgctagagcgtaggaatagaccctggcgtccactgtgagatgttcttcagctaccagagcatcaagtctctgcagcaggtcattcttgggtaaagaaatgacttccacaaactctccatcccctggctttggcttcggccttgcgttttcggcatcatctccgttaatggtgactgtcacgatgtgtatagtacagtttgacaagcctgggtccatacagaccgctggagaacattcggcaatgtcccctttgtagccagtttcttcttcgagctcccggagagcag

SEQ ID NO: 366 - DNA, 1851 bp, Homo sapien
tcatcaccattgccagcagcggcaccgttagtcaggttttctgggaatcccacatgagtacttccgtgttcttcattcttcttcaatagccataaatcttctagctctggctggctgttttcacttcctttaagcctttgtgactcttcctctgatgtcagctttaagtcttgttctggattgctgttttcagaagagatttttaacatctgtttttctttgtagtcagaaagtaactggcaaattacatgatgatgactagaaacagcatactctctggccgtctttccagatcttgagaagatacatcaacattttgctcaagtagagggctgactatacttgctgatccacaacatacagcaagtatgagagcagttcttccatatctatccagcgcatttaaattcgcttttttcttgattaaaaatttcaccacttgctgtttttgctcatgtataccaagtagcagtggtgtgaggccatgcttgttttttgattcgatatcagcaccgtataagagcagtgctttggccattaatttatcttcattgtagacagcatagtgtagagtggtatttccatactcatctggaatatttggatcagtgccatgttccagcaacattaacgcacattcatcttcctggcattgtacggcctttgtcagagctgtcctctttttgttgtcaaggacattaagttgacatcgtctgtccagcacgagttttactacttctgaattcccattggcagaggccagatgtagagcagtcctcttttgcttgtccctcttgttcacatccgtgtccctgagcatgacgatgagatcctttctggggactttaccccaccaggcagctctgtggagcttgtccagatcttctccatggacgtggtacctgggatccatgaaggcgctgtcatcgtagtctccccaagcgaccacgttgctcttgccgctcccctgcagcaggggaagcagtggcagcaccacttgcacctcttgctcccaagcgtcttcacagaggagtcgttgtggtctccagaagtgcccacgttgctcttgccgctccccctgtccatccagggaggaagaaatgcaggaaatgaaagatgcatgcacgatggtatactcctcagccatcaaacttctggacagcaggtcacttccagcaaggtggagaaagctgtccacccacagaggatgagatccagaaaccacaatatccattcacaaacaaacacttttcagccagacacaggtactgaaatcatgtcatctgcggcaacatggtggaacctacccaatcacacatcaagagatgaagacactgcagtatatctgcacaacgtaatactcttcatccataacaaaataatataattttcctctggagccatatggatgaactatgaaggaagaactccccgaagaagccagtcgcagagaagccacactgaagctctgtcctcagccatcagcgccacggacaggartgtgtttcttccccagtgatgcagcctcaagttatcccgaagctgccgcagcacacggtggctcctgagaaacaccccagctcttccggtctaacacaggcaagtcaataaatgtgataatcacataaacagaattaaaagcaaagtcacataagcatctcaacagacacagaaaaggcatttgacaaaatccagcatccttgtatttattgttgcagttctcagaggaaatgcttctaacttttccccatttagtattatgttggctgtgggcttgtcataggtggtttttattactttaaggtatgtcccttctatgcctgttttgctgagggttttaattctcgtgcc

SEQ ID NO: 367 - DNA, 668 bp, Homo sapien
cttgagcttccaaatayggaagactggcccttacacasgtcaatgttaaaatgaatgcatttcagtattttgaagataaaattrgtagatctataccttgttttttgattcgatatcagcaccrtataagagcagtgctttggccattaatttatctttcattrtagacagcrtagtgyagagtggtatttccatactcatctggaatatttggatcagtgccatgttccagcaacattaacgcacattcatcttcctggcattgtacggcctgtcagtattagacccaaaaacaaattacatatcttaggaattcaaaataacattccacagctttcaccaactagttatatttaaaggagaaaactcatttttatgccatgtattgaaatcaaacccacctcatgctgatatagttggctactgcatacctttatcagagctgtcctctttttgttgtcaaggacattaagttgacatcgtctgtccagcaggagttttactacttctgaattcccattggcagaggccagatgtagagcagtcctatgagagtgagaagactttttaggaaattgtagtgcactagctacagccatagcaatgattcatgtaactgcaaacactgaatagcctgctattactctgccttcaaaaaaaaaaaaaaa

SEQ ID NO: 368 - DNA, 1512 bp, Homo sapien
gggtcgcccagggggsgcgtgggctttcctcgggtgggtgtgggttttccctgggtggggtgggctgggctrgaatcccctgctggggttggcaggttttggctgggattgacttttytcttcaaacagattggaaacccggagttacctgctagttggtgaaactggttggtagacgcgatctgttggctactactggcttctcctggctgttaaaagcagatggtggttgaggttgattccatgccggctgcttcttctgtgaagaagccatttggtctcaggagcaagatgggcaagtggtgctgccgttgcttcccctgctgcagggagagcggcaagagcaacgtgggcacttctggagaccacgacgactctgctatgaagacactcaggagcaagatgggcaagtggtgccgccactgcttcccctgctgcagggggagtggcaagagcaacgtgggcgcttctggagaccacgacgaytctgctatgaagacactcaggaacaagatgggcaagtggtgctgccactgcttcccctgctgcagggggagcrgcaagagcaaggtgggcgcttggggagactacgatgacagtgccttcatggagcccaggtaccacgtccgtggagaagatctggacaagctccacagagctgcctggtggggtaaagtccccagaaaggatctcatcgtcatgctcagggacactgacgtgaacaagaaggacaagcaaaagaggactgctctacatctggcctctgccaatgggaattcagaagtagtaaaactcstgctggacagacgatgtcaacttaatgtccttgacaacaaaaagaggacagctctgayaaaggccgtacaatgccaggaagatgaatgtgcgttaatgttgctggaacatggcactgatccaaatattccagatgagtatggaaataccactctrcactaygctrtctayaatgaagataaattaatggccaaagcactgctcttatayggtgctgatatcgaatcaaaaaacaaggtatagatctactaattttatcttcaaaatactgaaatgcattcattttaacattgacgtgtgtaagggccagtcttccgtatttggaagctcaagcataacttgaatgaaaatattttgaaatgacctaattatctmagactttattttaaatattgttattttcaaagaagcattagagggtacagttttttttttttaaatgcacttctggtaaatacttttgttgaaaacactgaatttgtaaaaggtaatacttactatttttcaatttttccctcctaggatttttttcccctaatgaatgtaagatggcaaaatttgccctgaaataggttttacatgaaaactccaagaaaagttaaacatgtttcagtgaatagagatcctgctcctttggcaagttcctaaaaaacagtaatagatacgaggtgatgcgcctgtcagtggcaaggtttaagatatttctgatctcgtgcc

SEQ ID NO: 369 - DNA, 1853 bp, Homo sapien
gggtcgcccagggggsgcgtgggctttcctcgggtgggtgtgggttttccctgggtggggtgggctgggctrgaatcccctgctggggttggcaggttttggctgggattgacttttytcttcaaacagattggaaacccggagttacctgctagttggtgaaactggttggtagacgcgatctgttggctactactggcttctcctggctgttaaaagcagatggtggttgaggttgattccatgccggctgcttcttctgtgaagaagccatttggtctcaggagcaagatgggcaagtggtgctgccgttgcttcccctgctgcagggagagcggcaagagcaacgtgggcacttctggagaccacgacgactctgctatgaagacactcaggagcaagatgggcaagtggtgccgccactgcttcccctgctgcagggggagtggcaagagcaacgtgggcgcttctggagaccacgacgaytctgctatgaagacactcaggaacaagatgggcaagtggtgctgccactgcttcccctgctgcagggggagcrgcaagagcaaggtgggcgcttggggagactacgatgacagygccttcatggakcccaggtaccacgtccrtggagaagatctggacaagctccacagagctgcctggtggggtaaagtccccagaaaggatctcatcgtcatgctcagggacackgaygtgaacaagarggacaagcaaaagaggactgctctacatctggcctctgccaatgggaattcagaagtagtaaaactcstgctggacagacgatgtcaacttaatgtccttgacaacaaaaagaggacagctctgayaaaggccgtacaatgccaggaagatgaatgtgcgttaatgttgctggaacatggcactgatccaaatattccagatgagtatggaaataccactctrcactaygctrtctayaatgaagataaattaatggccaaagcactgctcttatayggtgctgatatcgaatcaaaaaacaagcatggcctcacaccactgytacttggtrtacatgagcaaaaacagcaagtsgtgaaatttttaatyaagaaaaaagcgaatttaaaatgcrctggatagatatggaagractgctctcatacttgctgtatgttgtggatcagcaagtatagtcagccytctacttgagcaaaatrttgatgtatcttctcaagatctggaaagacggccagagagtatgctgtttctagtcatcatcatgtaatttgccagttactttctgactacaaagaaaaacagatgttaaaaatctcttctgaaaacagcaatccagaacaagacttaaagctgacatcagaggaagagtcacaaaggcttaaaggaagtgaaaacagccagccagaggcatggaaacttttaaatttaaacttttggtttaatgttttttttttttgccttaataatattagatagtcccaaatgaaatwacctatgagactaggctttgagaatcaatagattctttttttaagaatcttttggctaggagcggtgtctcacgcctgtaattccagcaccttgagaggctgaggtgggcagatcacgagatcaggagatcgagaccatcctggctaacacggtgaaaccccatctctactaaaaatacaaaaacttagctgggtgtggtggcgggtgcctgtagtcccagctactcaggargctgaggcaggagaatggcatgaacccgggaggtggaggttgcagtgagccgagatccgccactacactccagcctgggtgacagagcaagactctgtctcaaaaaaaaaaaaaaaaaaaaa

SEQ ID NO: 370 - DNA, 2184 bp, Homo sapien
ggcacgagaattaaaaccctcagcaaaacaggcatagaagggacataccttaaagtaataaaaaccacctatgacaagcccacagccaacataatactaaatggggaaaagttagaagcatttcctctgagaactgcaacaataaatacaaggatgctggattttgtcaaatgccttttctgtgtctgttgagatgcttatgtgactttgcttttaattctgtttatgtgattatcacatttattgacttgcctgtgttagaccggaagagctggggtgtttctcaggagccaccgtgtgctgcggcagcttcgggataacttgaggctgcatcactggggaagaaacacaytcctgtccgtggcgctgatggctgaggacagagcttcagtgtggcttctctgcgactggcttcttcggggagttcttccttcatagttcatccatatggctccagaggaaaattatattattttgttatggatgaagagtattacgttgtgcagatatactgcagtgtcttcatctcttgatgtgtgattgggtaggttccaccatgttgccgcagatgacatgatttcagtacctgtgtctggctgaaaagtgtttgtttgtgaatggatattgtggtttctggatctcatcctctgtgggtggacagctttctccaccttgctggaagtgacctgctgtccagaagtttgatggctgaggagtataccatcgtgcatgcatctttcatttcctgcatttcttcctccctggatggacagggggagcggcaagagcaacgtgggcacttctggagaccacaacgactcctctgtgaagacgcttgggagcaagaggtgcaagtggtgctgccactgcttcccctgctgcaggggagcggcaagagcaacgtggtcgcttggggagactacgatgacagcgccttcatggatcccaggtaccacgtccatggagaagatctggacaagctccacagagctgcctggtggggtaaagtccccagaaaggatctcatcgtcatgctcagggacacggatgtgaacaagagggacaagcaaaagaggactgctctacatctggcctctgccaatgggaattcagaagtagtaaaactcgtgctggacagacgatgtcaacttaatgtccttgacaacaaaaagaggacagctctgacaaaggccgtacaatgccaggaagatgaatgtgcgttaatgttgctggaacatggcactgatccaaatattccagatgagtatggaaataccactctacactatgctgtctacaatgaagataaattaatggccaaagcactgctcttatacggtgctgatatcgaatcaaaaaacaagcatggcctcacaccactgctacttggtatacatgagcaaaaacagcaagtggtgaaatttttaatcaagaaaaaagcgaatttaaatgcgctggatagatatggaagaactgctctcatacttgctgtatgttgtggatcagcaagtatagtcagccctctacttgagcaaaatgttgatgtatcttctcaagatctggaaagacggccagagagtatgctgtttctagtcatcatcatgtaatttgccagttactttctgactacaaagaaaaacagatgttaaaaatctcttctgaaaacagcaatccagaacaagacttaaagctgacatcagaggaagagtcacaaaggcttaaaggaagtgaaaacagccagccagaggcatggaaacttttaaatttaaacttttggtttaatgttttttttttttgccttaataatattagatagtcccaaatgaaatwacctatgagactaggctttgagaatcaatagattctttttttaagaatcttttggctaggagcggtgtctcacgcctgtaattccagcaccttgagaggctgaggtgggcagatcacgagatcaggagatcgagaccatcctggctaacacggtgaaaccccatctctactaaaaatacaaaaacttagctgggtgtggtggcgggtgcctgtagtcccagctactcaggargctgaggcaggagaatggcatgaacccgggaggtggaggttgcagtgagccgagatccgccactacactccagcctgggtgacagagcaagactctgtctcaaaaaaaaaaaaaaaaaaaaa

SEQ ID NO: 371 - DNA, 1855 bp, Homo sapien
  misc_feature (1)...(1855): n = A,T,C or G
tgcacgcatcggccagtgtctgtgccacgtacactgacgccccctgagatgtgcacgccgcacgcgcacgttgcacgcgcggcagcggcttggctggcttgtaacggcttgcacgcgcacgccgcccccgcataaccgtcagactggcctgtaacggcttgcaggcgcacgccgcacgcgcgtaacggcttggctgccctgtaacggcttgcacgtgcatgctgcacgcgcgttaacggcttggctggcatgtagccgcttggcttggctttgcattytttgctkggctkggcgttgktytcttggattgacgcttcctccttggatkgacgtttcctccttggatkgacgtttcytytytcgcgttcctttgctggacttgaccttttytctgctgggtttggcattcctttggggtgggctgggtgttttctccgggggggktkgcccttcctggggtgggcgtgggkcgcccccagggggcgtgggctttccccgggtgggtgtgggttttcctggggtggggtgggctgtgctgggatccccctgctggggttggcagggattgacttttttcttcaaacagattggaaacccggagtaacntgctagttggtgaaactggttggtagacgcgatctgctggtactactgtttctcctggctgttaaaagcagatggtggctgaggttgattcaatgccggctgcttcttctgtgaagaagccatttggtctcaggagcaagatgggcaagtggtgcgccactgcttcccctgctgcagggggagcggcaagagcaacgtgggcacttctggagaccacaacgactcctctgtgaagacgcttgggagcaagaggtgcaagtggtgctgcccactgcttcccctgctgcaggggagcggcaagagcaacgtggkcgcttggggagactacgatgacagcgccttcatggakcccaggtaccacgtccrtggagaagatctggacaagctccacagagctgcctggtggggtaaagtccccagaaaggatctcatcgtcatgctcagggacactgaygtgaacaagarggacaagcaaaagaggactgctctacatctggcctctgccaatgggaattcagaagtagtaaaactcgtgctggacagacgatgtcaacttaatgtccttgacaacaaaaagaggacagctctgacaaaggccgtacaatgccaggaagatgaatgtgcgttaatgttgctggaacatggcactgatccaaatattccagatgagtatggaaataccactctacactatgctgtctacaatgaagataaattaatggccaaagcactgctcttatacggtgctgatatcgaatcaaaaaacaaggtatagatctactaattttatcttcaaaatactgaaatgcattcattttaacattgacgtgtgtaagggccagtcttccgtatttggaagctcaagcataacttgaatgaaaatattttgaaatgacctaattatctaagactttattttaaatattgttattttcaaagaagcattagagggtacagttttttttttttaaatgcacttctggtaaatacttttgttgaaaacactgaatttgtaaaaggtaatacttactatttttcaatttttccctcctaggatttttttcccctaatgaatgtaagatggcaaaatttgccctgaaataggttttacatgaaaactccaagaaaagttaaacatgtttcagtgaatagagatcctgctcctttggcaagttcctaaaaaacagtaatagatacgaggtgatgcgcctgtcagtggcaaggtttaagatatttctgatctcgtgcc

SEQ ID NO: 372 - DNA, 1059 bp, Homo sapien
gcaacgtgggcacttctggagaccacaacgactcctctgtgaagacgcttgggagcaagaggtgcaagtggtgctgcccactgcttcccctgctgcaggggagcggcaagagcaacgtgggcgcttgrggagactmcgatgacagygccttcatggagcccaggtaccacgtccgtggagaagatctggacaagctccacagagctgccctggtggggtaaagtccccagaaaggatctcatcgtcatgctcagggacactgaygtgaacaagarggacaagcaaaagaggactgctctacatctggcctctgccaatgggaattcagaagtagtaaaactcstgctggacagacgatgtcaacttaatgtccttgacaacaaaaagaggacagctctgayaaaggccgtacaatgccaggaagatgaatgtgcgttaatgttgctggaacatggcactgatccaaatattccagatgagtatggaaataccactctrcactaygctrtctayaatgaagataaattaatggccaaagcactgctcttatayggtgctgatatcgaatcaaaaaacaaggtatagatctactaattttatcttcaaaatactgaaatgcattcattttaacattgacgtgtgtaagggccagtcttccgtatttggaagctcaagcataacttgaatgaaaatattttgaaatgacctaattatctaagactttattttaaatattgttattttcaaagaagcattagagggtacagttttttttttttaaatgcacttctggtaaatacttttgttgaaaacactgaatttgtaaaaggtaatacttactatttttcaatttttccctcctaggatttttttcccctaatgaatgtaagatggcaaaatttgccctgaaataggttttacatgaaaactccaagaaaagttaaacatgtttcagtgaatagagatcctgctcctttggcaagttcctaaaaaacagtaatagatacgaggtgatgcgcctgtcagtggcaaggtttaagatatttctgatctcgtgcc

SEQ ID NO: 373 - DNA, 1155 bp, Homo sapien
atggtggttgaggttgattccatgccggctgcctcttctgtgaagaagccatttggtctcaggagcaagatgggcaagtggtgctgccgttgcttcccctgctgcagggagagcggcaagagcaacgtgggcacttctggagaccacgacgactctgctatgaagacactcaggagcaagatgggcaagtggtgccgccactgcttcccctgctgcagggggagtggcaagagcaacgtgggcgcttctggagaccacgacgactctgctatgaagacactcaggaacaagatgggcaagtggtgctgccactgcttcccctgctgcagggggagcggcaagagcaaggtgggcgcttggggagactacgatgacagtgccttcatggagcccaggtaccacgtccgtggagaagatctggacaagctccacagagctgcctggtggggtaaagtccccagaaaggatctcatcgtcatgctcagggacactgacgtgaacaagaaggacaagcaaaagaggactgctctacatctggcctctgccaatgggaattcagaagtagtaaaactcctgctggacagacgatgtcaacttaatgtccttgacaacaaaaagaggacagctctgataaaggccgtacaatgccaggaagatgaatgtgcgttaatgttgctggaacatggcactgatccaaatattccagatgagtatggaaataccactctgcactacgctatctataatgaagataaattaatggccaaagcactgctcttatatggtgctgatatcgaatcaaaaaacaagcatggcctcacaccactgttacttggtgtacatgagcaaaaacagcaagtcgtgaaatttttaatcaagaaaaaagcgaatttaaatgcactggatagatatggaaggactgctctcatacttgctgtatgttgtggatcagcaagtatagtcagccttctacttgagcaaaatattgatgtatcttctcaagatctatctggacagacggccagagagtatgctgtttctagtcatcatcatgtaatttgccagttactttctgactacaaagaaaaacagatgctaaaaatctcttctgaaaacagcaatccagaaaatgtctcaagaaccagaaataaataa

SEQ ID NO: 374 - DNA, 2000 bp, Homo sapien
atggtggttgaggttgattccatgccggctgcctcttctgtgaagaagccatttggtctcaggagcaagatgggcaagtggtgctgccgttgcttcccctgctgcagggagagcggcaagagcaacgtgggcacttctggagaccacgacgactctgctatgaagacactcaggagcaagatgggcaagtggtgccgccactgcttcccctgctgcagggggagtggcaagagcaacgtgggcgcttctggagaccacgacgactctgctatgaagacactcaggaacaagatgggcaagtggtgctgccactgcttcccctgctgcagggggagcggcaagagcaaggtgggcgcttggggagactacgatgacagtgccttcatggagcccaggtaccacgtccgtggagaagatctggacaagctccacagagctgcctggtggggtaaagtccccagaaaggatctcatcgtcatgctcagggacactgacgtgaacaagaaggacaagcaaaagaggactgctctacatctggcctctgccaatgggaattcagaagtagtaaaactcctgctggacagacgatgtcaacttaatgtccttgacaacaaaaagaggacagctctgataaaggccgtacaatgccaggaagatgaatgtgcgttaatgttgctggaacatggcactgatccaaatattccagatgagtatggaaataccactctgcactacgctatctataatgaagataaattaatggccaaagcactgctcttatatggtgctgatatcgaatcaaaaaacaagcatggcctcacaccactgttacttggtgtacatgagcaaaaacagcaagtcgtgaaatttttaatcaagaaaaaagcgaatttaaatgcactggatagatatggaaggactgctctcatacttgctgtatgttgtggatcagcaagtatagtcagccttctacttgagcaaaatattgatgtatcttctcaagatctatctggacagacggccagagagtatgctgtttctagtcatcatcatgtaatttgccagttactttctgactacaaagaaaaacagatgctaaaaatctcttctgaaaacagcaatccagaacaagacttaaagctgacatcagaggaagagtcacaaaggttcaaaggcagtgaaaatagccagccagagaaaatgtctcaagaaccagaaataaataaggatggtgatagagaggttgaagaagaaatgaagaagcatgaaagtaataatgtgggattactagaaaacctgactaatggtgtcactgctggcaatggtgataatggattaattcctcaaaggaagagcagaacacctgaaaatcagcaatttcctgacaacgaaagtgaagagtatcacagaatttgcgaattagtttctgactacaaagaaaaacagatgccaaaatactcttctgaaaacagcaacccagaacaagacttaaagctgacatcagaggaagagtcacaaaggcttgagggcagtgaaaatggccagccagagctagaaaattttatggctatcgaagaaatgaagaagcacggaagtactcatgtcggattcccagaaaacctgactaatggtgccactgctggcaatggtgatgatggattaattcctccaaggaagagcagaacacctgaaagccagcaatttcctgacactgagaatgaagagtatcacagtgacgaacaaaatgatactcagaagcaattttgtgaagaacagaacactggaatattacacgatgagattctgattcatgaagaaaagcagatagaagtggttgaaaaaatgaattctgagctttctcttagttgtaagaaagaaaaagacatcttgcatgaaaatagtacgttgcgggaagaaattgccatgctaagactggagctagacacaatgaaacatcagagccagctaaaaaaaaaaaaaaaaaaaaaaaaaaaaaaaaa

SEQ ID NO: 375 - DNA, 2040 bp, Homo sapien
atggtggttgaggttgattccatgccggctgcctcttctgtgaagaagccatttggtctcaggagcaagatgggcaagtggtgctgccgttgcttcccctgctgcagggagagcggcaagagcaacgtgggcacttctggagaccacgacgactctgctatgaagacactcaggagcaagatgggcaagtggtgccgccactgcttcccctgctgcagggggagtggcaagagcaacgtgggcgcttctggagaccacgacgactctgctatgaagacactcaggaacaagatgggcaagtggtgctgccactgcttcccctgctgcagggggagcggcaagagcaaggtgggcgcttggggagactacgatgacagtgccttcatggagcccaggtaccacgtccgtggagaagatctggacaagctccacagagctgcctggtggggtaaagtccccagaaaggatctcatcgtcatgctcagggacactgacgtgaacaagaaggacaagcaaaagaggactgctctacatctggcctctgccaatgggaattcagaagtagtaaaactcctgctggacagacgatgtcaacttaatgtccttgacaacaaaaagaggacagctctgataaaggccgtacaatgccaggaagatgaatgtgcgttaatgttgctggaacatggcactgatccaaatattccagatgagtatggaaataccactctgcactacgctatctataatgaagataaattaatggccaaagcactgctcttatatggtgctgatatcgaatcaaaaaacaagcatggcctcacaccactgttacttggtgtacatgagcaaaaacagcaagtcgtgaaatttttaatcaagaaaaaagcgaatttaaatgcactggatagatatggaaggactgctctcatacttgctgtatgttgtggatcagcaagtatagtcagccttctacttgagcaaaatattgatgtatcttctcaagatctatctggacagacggccagagagtatgctgtttctagtcatcatcatgtaatttgccagttactttctgactacaaagaaaaacagatgctaaaaatctcttctgaaaacagcaatccagaacaagacttaaagctgacatcagaggaagagtcacaaaggttcaaaggcagtgaaaatagccagccagagaaaatgtctcaagaaccagaaataaataaggatggtgatagagaggttgaagaagaaatgaagaagcatgaaagtaataatgtgggattactagaaaacctgactaatggtgtcactgctggcaatggtgataatggattaattcctcaaaggaagagcagaacacctgaaaatcagcaatttcctgacaacgaaagtgaagagtatcacagaatttgcgaattagtttctgactacaaagaaaaacagatgccaaaatactcttctgaaaacagcaacccagaacaagacttaaagctgacatcagaggaagagtcacaaaggcttgagggcagtgaaaatggccagccagagaaaagatctcaagaaccagaaataaataaggatggtgatagagagctagaaaattttatggctatcgaagaaatgaagaagcacggaagtactcatgtcggattcccagaaaacctgactaatggtgccactgctggcaatggtgatgatggattaattcctccaaggaagagcagaacacctgaaagccagcaatttcctgacactgagaatgaagagtatcacagtgacgaacaaaatgatactcagaagcaattttgtgaagaacagaacactggaatattacacgatgagattctgattcatgaagaaaagcagatagaagtggttgaaaaaatgaattctgagctttctcttagttgtaagaaagaaaaagacatcttgcatgaaaatagtacgttgcgggaagaaattgccatgctaagactggagctagacacaatgaaacatcagagccagctaaaaaaaaaaaaaaaaaaaaaaaaaaaa

SEQ ID NO: 376 - protein, 329 aa, Homo sapien
MDIVVSGSHPLWVDSFLHLAGSDLLSRSLMAEEYTIVHASFISCISSSLDGQGERQEQRGHFWRPQRLLCEDAWEQEVQVVLPLLPLLQGSGKSNVVAWGDYDDSAFMDPRYHVHGEDLDKLHRAAWWGKVPRKDLIVMLRDTDVNKRDKQKRTALHLASANGNSEVVKLVLDRRCQLNVLDNKKRTALTKAVQCQEDECALMLLEHGTDPNIPDEYGNTTLHYAVYNEDKLMAKALLLYGADIESKNKHGLTPLLLGIHEQKQQVVKFLIKKKANLNALDRYGRTALILAVCCGSASIVSPLLEQNVDVSSQDLERRPESMLFLVIIM

SEQ ID NO: 377 - protein, 148 aa, Homo sapien
  VARIANT (1)...(148): Xaa = Any Amino Acid
MTXPSWSPGTTSVEKIWTSSTELPWWGKVPRKDLIVMLRDTDVNKXDKQKRTALHLASANGNSEVVKLXLDRRCQLNVLDNKKRTALXKAVQCQEDECALMLLEHGTDPNIPDEYGNTTLHYAXYNEDKLMAKALLLYGADIESKNKV

SEQ ID NO: 378 - protein, 1719 aa, Homo sapien [sequence omitted]

SEQ ID NO: 379 - protein, 656 aa, Homo sapien
MVVEVDSMPAASSVKKPFGLRSKMGKWCCRCFPCCRESGKSNVGTSGDHDDSAMKTLRSKMGKWCRHCFPCCRGSGKSNVGASGDHDDSAMKTLRNKMGKWCCHCFPCCRGSGKSKVGAWGDYDDSAFMEPRYHVRGEDLDKLHRAAWWGKVPRKDLIVMLRDTDVNKKDKQKRTALHLASANGNSEVVKLLLDRRCQLNVLDNKKRTALIKAVQCQEDECALMLLEHGTDPNIPDEYGNTTLHYAIYNEDKLMAKALLLYGADIESKNKHGLTPLLLGVHEQKQQVVKFLIKKKANLNALDRYGRTALILAVCCGSASIVSLLLEQNIDVSSQDLSGQTAREYAVSSHHHVICQLLSDYKEKQMLKISSENSNPEQDLKLTSEEESQRFKGSENSQPEKMSQEPEINKDGDREVEEEMKKHESNNVGLLENLTNGVTAGNGDNGLIPQRKSRTPENQQFPDNESEEYHRICELVSDYKEKQMPKYSSENSNPEQDLKLTSEEESQRLEGSENGQPELENFMAIEEMKKHGSTHVGFPENLTNGATAGNGDDGLIPPRKSRTPESQQFPDTENEEYHSDEQNDTQKQFCEEQNTGILHDEILIHEEKQIEVVEKMNSELSLSCKKEKDILHENSTLREEIAMLRLELDTMKHQSQL

SEQ ID NO: 380 - protein, 671 aa, Homo sapien
MVVEVDSMPAASSVKKPFGLRSKMGKWCCRCFPCCRESGKSNVGTSGDHDDSAMKTLRSKMGKWCRHCFPCCRGSGKSNVGASGDHDDSAMKTLRNKMGKWCCHCFPCCRGSGKSKVGAWGDYDDSAFMEPRYHVRGEDLDKLHRAAWWGKVPRKDLIVMLRDTDVNKKDKQKRTALHLASANGNSEVVKLLLDRRCQLNVLDNKKRTALIKAVQCQEDECALMLLEHGTDPNIPDEYGNTTLHYAIYNEDKLMAKALLLYGADIESKNKHGLTPLLLGVHEQKQQVVKFLIKKKANLNALDRYGRTALILAVCCGSASIVSLLLEQNIDVSSQDLSGQTAREYAVSSHHHVICQLLSDYKEKQMLKISSENSNPEQDLKLTSEEESQRFKGSENSQPEKMSQEPEINKDGDREVEEEMKKHESNNVGLLENLTNGVTAGNGDNGLIPQRKSRTPENQQFPDNESEEYHRICELVSDYKEKQMPKYSSENSNPEQDLKLTSEEESQRLEGSENGQPEKRSQEPEINKDGDRELENFMAIEEMKKHGSTHVGFPENLTNGATAGNGDDGLIPPRKSRTPESQQFPDTENEEYHSDEQNDTQKQFCEEQNTGILHDEILIHEEKQIEVVEKMNSELSLSCKKEKDILHENSTLREEIAMLRLELDTMKHQSQL

SEQ ID NO: 381 - DNA, 251 bp, Homo sapien
ggagaagcgtctgctggggcaggaaggggtttccctgccctctcacctgtccctcaccaaggtaacatgcttcccctaagggtatcccaacccaggggcctcaccatgacctctgaggggccaatatcccaggagaagcattggggagttgggggcaggtgaaggacccaggactcacacatcctgggcctccaaggcagaggagagggtcctcaagaaggtcaggaggaaaatccgtaacaagcagtcag

SEQ ID NO: 382 - DNA, 3279 bp, Homo sapiens
cttcctgcagcccccatgctggtgaggggcacgggcaggaacagtggacccaacatggaaatgctggagggtgtcaggaagtgatcgggctctggggcagggaggaggggtggggagtgtcactgggaggggacatcctgcagaaggtaggagtgagcaaacacccgctgcaggggaggggagagccctgcggcacctgggggagcagagggagcagcacctgcccaggcctgggaggaggggcctggagggcgtgaggaggagcgagggggctgcatggctggagtgagggatcaggggcagggcgcgagatggcctcacacagggaagagagggcccctcctgcagggcctcacctgggccacaggaggacactgcttttcctctgaggagtcaggagctgtggatggtgctggacagaagaaggacagggcctggctcaggtgtccagaggctgtcgctggcttccctttgggatcagactgcagggagggagggcggcagggttgtggggggagtgacgatgaggatgacctgggggtggctccaggccttgcccctgcctgggccctcacccagcctccctcacagtctcctggccctcagtctctcccctccactccatcctccatctggcctcagtgggtcattctgatcactgaactgaccatacccagccctgcccacggccctccatggctccccaatgccctggagaggggacatctagtcagagagtagtcctgaagaggtggcctctgcgatgtgcctgtgggggcagcatcctgcagatggtcccggccctcatcctgctgacctgtctgcagggactgtcctcctggaccttgccccttgtgcaggagctggaccctgaagtcccctccccataggccaagactggagccttgttccctctgttggactccctgcccatattcttgtgggagtgggttctggagacatttctgtctgttcctgagagctgggaattgctctcagtcatctgcctgcgcggttctgagagatggagttgcctaggcagttattggggccaatctttctcactgtgtctctcctcctttacccttagggtgattctgggggtccacttgtctgtaatggtgtgcttcaaggtatcacatcatggggccctgagccatgtgccctgcctgaaaagcctgctgtgtacaccaaggtggtgcattaccggaagtggatcaaggacaccatcgcagccaacccctgagtgcccctgtcccacccctacctctagtaaatttaagtccacctcacgttctggcatcacttggcctttctggatgctggacacctgaagcttggaactcacctggccgaagctcgagcctcctgagtcctactgacctgtgctttctggtgtggagtccagggctgctaggaaaaggaatgggcagacacaggtgtatgccaatgtttctgaaatgggtataatttcgtcctctccttcggaacactggctgtctctgaagacttctcgctcagtttcagtgaggacacacacaaagacgtgggtgaccatgttgtttgtggggtgcagagatgggaggggtggggcccaccctggaagagtggacagtgacacaaggtggacactctctacagatcactgaggataagctggagccacaatgcatgaggcacacacacagcaaggttgacgctgtaaacatagcccacgctgtcctgggggcactgggaagcctagataaggccgtgagcagaaagaaggggaggatcctcctatgttgttgaaggagggactagggggagaaactgaaagctgattaattacaggaggtttgttcaggtcccccaaaccaccgtcagatttgatgatttcctagcaggacttacagaaataaagagctatcatgctgtggtttattatggtttgttacattgataggatacatactgaaatcagcaaacaaaacagatgtatagattagagtgtggagaaaacagaggaaaacttgcagttacgaagactggcaacttggctttactaagttttcagactggcaggaagtcaaacctattaggctgaggaccttgtggagtgtagctgatccagctgatagaggaactagccaggtgggggcctttccctttggatggggggcatatccgacagttattctctccaagtggagacttacggacagcatataattctccctgcaaggatgtatgataatatgtacaaagtaattccaactgaggaagctcacctgatccttagtgtccagggtttttactgggggtctgtaggacgagtatggagtacttgaataattgacctgaagtcctcagacctgaggttccctagagttcaaacagatacagcatggtccagagtcccagatgtacaaaaacagggattcatcacaaatcccatctttagcatgaagggtctggcatggcccaaggccccaagtatatcaaggcacttgggcagaacatgccaaggaatcaaatgtcatctcccaggagttattcaagggtgagccctttacttgggatgtacaggctttgagcagtgcagggctgctgagtcaaccttttattgtacaggggatgagggaaagggagaggatgaggaagcccccctggggatttggtttggtcttgtgatcaggtggtctatggggctatccctacaaagaagaatccagaaataggggcacattgaggaatgatactgagcccaaagagcattcaatcattgttttatttgccttcttttcacaccattggtgagggagggattaccaccctggggttatgaagatggttgaacaccccacacatagcaccggagatatgagatcaacagtttcttagccatagagattcacagcccagagcaggaggacgctgcacaccatgcaggatgacatgggggatgcgctcgggattggtgtgaagaagcaaggactgttagaggcaggctttatagtaacaagacggtggggcaaactctgatttccgtgggggaatgtcatggtcttgctttactaagttttgagactggcaggtagtgaaactcattaggctgagaaccttgtggaatgcagctgacccagctgatagaggaagtagccaggtgggagcctttcccagtgggtgtgggacatatctggcaagattttgtggcactcctggttacagatactggggcagcaaataaaactgaatcttgttttcagaccttaaaaaaaaaaaaaaaaaaaaagtttt

SEQ ID NO: 383 - protein, 154 aa, Homo sapiens [sequence omitted]

SEQ ID NO: 384 - DNA, 557 bp, Homo sapiens
ggatcctctagagcggccgcctactactactaaattcgcggccgcgtcgacgaagaagagaaagatgtgttttgttttggactctctgtggtcccttccaatgctgtgggtttccaaccaggggaagggtcccttttgcattgccaagtgccataaccatgagcactactctaccatggttctgcctcctggccaagcaggctggtttgcaagaatgaaatgaatgattctacagctaggacttaaccttgaaatggaaagtcttgcaatcccatttgcaggatccgtctgtgcacatgcctctgtagagagcagcattcccagggaccttggaaacagttggcactgtaaggtgcttgctccccaagacacatcctaaaaggtgttgtaatggtgaaaacgtcttccttctttattgccccttcttatttatgtgaacaactgtttgtctttttttgtatcttttttaaactgtaaagttcaattgtgaaaatgaatatcatgcaaataaattatgcgatttttttttcaaagtaaaaaaaaaaaaaaaaaaaaaa

SEQ ID NO: 385 - DNA, 337 bp, Homo sapiens
ttcccaggtgatgtgcgagggaagacacatttactatccttgatggggctgattcctttagtttctctagcagcagatgggttaggaggaagtgacccaagtggttgactcctatgtgcatctcaaagccatctgctgtcttcgagtacggacacatcatcactcctgcattgttgatcaaaacgtggaggtgcttttcctcagctaagaagcccttagcaaaagctcgaatagacttagtatcagacaggtccagtttccgcaccaacacctgctggttccctgtcgtggtctggatctctttggccaccaattcccccttttccacatcccggca

SEQ ID NO: 386 - DNA, 300 bp, Homo sapiens
gggcccgctaccggcccaggccccgcctcgcgagtcctcctccccgggtgcctgcccgcagcccgctcggcccagagggtgggcgcggggctgcctctaccggctggcggctgtaactcagcgaccttggcccgaaggctctagcaaggacccaccgaccccagccgcggcggcggcggcgcggactttgcccggtgtgtggggcggagcggactgcgtgtccgcggacgggcagcgaagatgttagccttcgctgccaggaccgtggaccgatcccagggctgtggtgtaacctcagcc

SEQ ID NO: 387 - DNA, 537 bp, Homo sapiens
gggccgagtcgggcaccaagggactctttgcaggcttccttcctcggatcatcaaggctgccccctcctgtgccatcatgatcagcacctatgagttcggcaaaagcttcttccagaggctgaaccaggaccggcttctgggcggctgaaaggggcaaggaggcaaggaccccgtctctcccacggatggggagagggcaggaggagacccagccaagtgccttttcctcagcactgagggagggggcttgtttcccttccctcccggcgacaagctccagggcagggctgtccctctgggcggcccagcacttcctcagacacaacttcttcctgctgctccagtcgtggggatcatcacttacccaccccccaagttcaagaccaaatcttccagctgcccccttcgtgtttccctgtgtttgctgtagctgggcatgtctccaggaaccaagaagccctcagcctggtgtagtctccctgacccttgttaattccttaagtctaaagatgatgaacttcaaaaaaaaaaaaaaa

SEQ ID NO: 388 - DNA, 520 bp, Homo sapiens
aggataatttttaaaccaatcaaatgaaaaaaacaaacaaacaaaaaaggaaatgtcatgtgaggttaaaccagtttgcattcccctaatgtggaaaaagtaagaggactactcagcactgtttgaagattgcctcttctacagcttctgagaattgtgttatttcacttgccaagtgaaggaccccctccccaacatgccccagcccacccctaagcatggtcccttgtcaccaggcaaccaggaaactgctacttgtggacctcaccagagaccaggagggtttggttagctcacaggacttcccccaccccagaagattagcatcccatactagactcatactcaactcaactaggctcatactcaattgatggttattagacaattccatttctttctggttattataaacagaaaatctttcctcttctcattaccagtaaaggctcttggtatctttctgttggaatgatttctatgaacttgtcttattttaatggtgggttttttttctggt

SEQ ID NO: 389 - DNA, 365 bp, Homo sapiens
cgttgccccagtttgacagaaggaaaggcggagcttattcaaagtctagagggagtggaggagttaaggctggatttcagatctgcctggttccagccgcagtgtgccctctgctcccccaacgactttccaaataatctcaccagcgccttccagctcaggcgtcctagaagcgtcttgaagcctatggccagctgtctttgtgttccctctcacccgcctgtcctcacagctgagactcccaggaaaccttcagactaccttcctctgccttcagcaaggggcgttgcccacattctctgagggtcagtggaagaacctagactcccattgctagaggtagaaaggggaagggtgctggggag

SEQ ID NO: 390 - DNA, 221 bp, Homo sapiens
  misc_feature (1)...(221): n = A,T,C or G
tgcctctccatcctggccccgacttctctgtcaggaaagtggggatggaccccatctgcatacacggnttctcatgggtgtggaacatctctgcttgcggtttcaggaaggcctctggctgctctangagtctgancngantcgttgccccantntgacanaaggaaaggcggagcttattcaaagtctagagggagtggaggagttaaggctggatttca

SEQ ID NO: 391 - DNA, 325 bp, Homo sapiens
  misc_feature (1)...(325): n = A,T,C or G
tggagcaggtcccgaggcctccctagagcctggggccgactctgtgncgatgcangctttctctcgcgcccagcctggagctgctcctggcatctaccaacaatcagncgaggcgagcagtagccagggcactgctgccaacagccagtccnnataccatcatgtnacccggtgngctctnaanttngatntccanagccctacccatcntagttctgctctcccaccggntaccagccccactgcccaggaatcctacagccagtaccctgtcccgacgtctctacctaccagtacgatgagacctccggctactactatgacc

SEQ ID NO: 392 - DNA, 277 bp, Homo sapiens
  misc_feature (1)...(277): n = A,T,C or G
atattgtttaactccttcctttatatcttttaacattttcatggngaaaggttcacatctagtctcacttnggcnagngnctcctacttgagtctcttccccggcctgnnccagtngnaaantaccangaaccgncatgncttaanaacnncctggtttntgggttnntcaatgactgcatgcagtgcaccaccctgtccactacgtgatgctgtaggattaaagtctcacagtgggcggctgaggatacagcgccgcgtcctgtgttgctggggaa

SEQ ID NO: 393 - DNA, 566 bp, Homo sapiens
actagtccagtgtggtggaattcgcggccgcgtcgacggacaggtcagctgtctggctcagtgatctacattctgaagttgtctgaaaatgtcttcatgattaaattcagcctaaacgttttgccgggaacactgcagagacaatgctgtgagtttccaaccttagcccatctgcgggcagagaaggtctagtttgtccatcagcattatcatgatatcaggactggttacttggttaaggaggggtctaggagatctgtcccttttagagacaccttacttataatgaagtatttgggagggtggttttcaaaagtagaaatgtcctgtattccgatgatcatcctgtaaacattttatcatttattaatcatccctgcctgtgtctattattatattcatatctctacgctggaaactttctgcctcaatgtttactgtgcctttgtttttgctagtttgtgttgttgaaaaaaaaaacattctctgcctgagttttaatttttgtccaaagttattttaatctatacaattaaaagcttttgcctatcaaaaaaaaaaaaaaa

SEQ ID NO: 394 - DNA, 384 bp, Homo sapiens
  misc_feature (1)...(384): n = A,T,C or G
gaacatacatgtcccggcacctgagctgcagtctgacatcatcgccatcacgggcctcgctgcaaattnggaccgggccaaggctggactgctggagcgtgtgaaggagctacaggccnagcaggaggaccgggctttaaggagttttaagctgagtgtcactgtagaccccaaataccatcccaagattatcgggagaaagggggcagtaattacccaaatccggttggagcatgacgtgaacatccagtttcctgataaggacgatgggaaccagccccaggaccaaattaccatcacagggtacgaaaagaacacagaagctgccagggatgctatactgagaattgtgggtgaacttgagcagatggtttctgaggacgt

SEQ ID NO: 395 - DNA, 399 bp, Homo sapiens
ggcaaaactgtgtgacctcaataagacctcgcagatccaaggtcaagtatcagaagtgactctgaccttggactccaagacctacatcaacagcctggctatattagatgatgagccagttatcagaggtttcatcattgcggaaattgtggagtctaaggaaatcatggcctctgaagtattcacgtctttccagtaccctgagttctctatagagttgcctaacacaggcagaattggccagctacttgtctgcaattgtatcttcaagaataccctggccatccctttgactgacgtcaagttctctttggaaagcctgggcatctcctcactacagacctctgaccatgggacggtgcagcctggtgagaccatccaatcccaaataaaatgcac

SEQ ID NO: 396 - DNA, 403 bp, Homo sapiens
  misc_feature (1)...(403): n = A,T,C or G
tggagttntcagtgcaaacaagccataaagcttcagtagcaaattactgtctcacagaaagacattttcaacttctgctccagctgctgataaaacaaatcatgtgtttagcttgactccagacaaggacaacctgttccttcataactctctagagaaaaaaaggagttgttagtagatactaaaaaaagtggatgaataatctggatatttttcctaaaaagattccttgaaacacattaggaaaatggagggccttatgatcagaatgctagaattagtccattgtgctgaagcagggtttaggggagggagtgagggataaaagaaggaaaaaaagaagagtgagaaaacctatttatcaaagcaggtgctatcactcaatgttaggccctgctctttt

SEQ ID NO: 397 - DNA, 100 bp, Homo sapiens
  misc_feature (1)...(100): n = A,T,C or G
actagtncagtgtggtggaattcgcggccgcgtcgacctanaanccatctctatagcaaatccatccccgctcctggttggtnacagaatgactgacaaa

SEQ ID NO: 398 - DNA, 278 bp, Homo sapiens
  misc_feature (1)...(278): n = A,T,C or G
gcggccgcgtcgacagcagttccgccagcgctcgcccctgggtggggatgtgctgcacgcccacctggacatctggaagtcagcggcctggatgaaagagcggacttcacctggggcgattcactactgtgcctcgaccagtgaggagagctggaccgacagcgaggtggactcatcatgctccgggcagcccatccacctgtggcagttcctcaaggagttgctactcaagccccacagctatggccgcttcattangtggctcaacaaggagaagg

SEQ ID NO: 399 - DNA, 298 bp, Homo sapiens
  misc_feature (1)...(298): n = A,T,C or G
acggaggtggaggaagcgnccctgggatcganaggatgggtcctgncattgaccncctcnggggtgccngcatggagcgcatgggcgcgggcctgggccacggcatggatcgcgtgggctccgagatcgagcgcatgggcctggtcatggaccgcatgggctccgtggagcgcatgggctccggcattgagcgcatgggcccgctgggcctcgaccacatggcctccancattgancgcatgggccagaccatggagcgcattggctctggcgtggagcncatgggtgccggcatggg

SEQ ID NO: 400 - DNA, 548 bp, Homo sapiens
acatcaactacttcctcattttaaggtatggcagttcccttcatccccttttcctgccttgtacatgtacatgtatgaaatttccttctcttaccgaactctctccacacatcacaaggtcaaagaaccacacgcttagaagggtaagagggcaccctatgaaatgaaatggtgatttcttgagtctcttttttccacgtttaaggggccatggcaggacttagagttgcgagttaagactgcagagggctagagaattatttcatacaggctttgaggccacccatgtcacttatcccgtataccctctcaccatccccttgtctactctgatgcccccaagatgcaactgggcagctagttggccccataattctgggcctttgttgtttgttttaattacttgggcatcccaggaagctttccagtgatctcctaccatgggcccccctcctgggatcaagcccctcccaggccctgtccccagcccctcctgccccagcccacccgcttgccttggtgctcagccctcccattgggagcaggtt

SEQ ID NO: 401 - DNA, 355 bp, Homo sapiens
  misc_feature (1)...(355): n = A,T,C or G
actgtttccatgttatgtttctacacattgctacctcagtgctcctggaaacttagcttttgatgtctccaagtagtccaccttcatttaactctttgaaactgtatcatctttgccaagtaagagtggtggcctatttcagctgctttgacaaaatgactggctcctgacttaacgttctataaatgaatgtgctgaagcaaagtgcccatggtggcggcgaagaaganaaagatgtgttttgttttggactctctgtggtcccttccaatgctgngggtttccaaccaggggaagggtcccttttgcattgccaagtgccataaccatgagcactactctaccatggntctgc

SEQ ID NO: 402 - DNA, 407 bp, Homo sapiens
  misc_feature (1)...(407): n = A,T,C or G
atggggcaagctggataaagaaccaagacccactggagtatgctgtcttcaagaaacccatctcacatgcggtggcatacataggctcaaaataaaggaatggagaaaaatatttcaagcaaatggaaaacagaaaaaagcaggtgttgcactcctactttctgacaaaacagactatgcgaataaagataaaaaagagaaggacattacaaaggtggtcctgacctttgataaatctcattgcttgataccaacctgggctgttttaattgcccaaaccaaaaggataatttgctgaggttgtggagcttctcccctgcagagagtccctgatctcccaaaatttggttgagatgtaaggntgattttgctgacaactccttttctgaagttttactcatttccaa

SEQ ID NO: 403 - DNA, 303 bp, Homo sapiens
  misc_feature (1)...(303): n = A,T,C or G
cagtatttatagccnaactgaaaagctagtagcaggcaagtctcaaatccaggcaccaaatcctaagcaagagccatggcatggtgaaaatgcaaaaggagagtctggccaatctacaaatagagaacaagacctactcagtcatgaacaaaaaggcagacaccaacatggatctcatgggggattggatattgtaattatagagcaggaagatgacagtgatcgtcatttggcacaacatcttaacaacgaccgaaacccattatttacataaacctccattcggtaaccatgttgaaagga

SEQ ID NO: 404 - DNA, 225 bp, Homo sapiens
aagtgtaacttttaaaaatttagtggattttgaaaattcttagaggaaagtaaaggaaaaattgttaatgcactcatttacctttacatggtgaaagttctctcttgatcctacaaacagacattttccactcgtgtttccatagttgttaagtgtatcagatgtgttgggcatgtgaatctccaagtgcctgtgtaataaataaagtatctttatttcattcat

SEQ ID NO: 405 - DNA, 334 bp, Homo sapiens
  misc_feature (1)...(334): n = A,T,C or G
gagctgttatactgtgagttctactaggaaatcatcaaatctgagggttgtctggaggacttcaatacacctccccccatagtgaatcagcttccagggggtccagtccctctccttacttcatccccatcccatgccaaaggaagaccctccctccttggctcacagccttctctaggcttcccagtgcctccaggacagagtgggttatgttttcagctccatccttgctgtgagtgtctggtgcggttgtgcctccagcttctgctcagtgcttcatggacagtgtccagcccatgtcactctccactctctcanngtggatcccacccct

SEQ ID NO: 406 - DNA, 216 bp, Homo sapiens
  misc_feature (1)...(216): n = A,T,C or G
tttcatacctaatgagggagttganatnacatnnaaccaggaaatgcatggatctcaanggaaacaaacacccaataaactcggagtggcagactgacaactgtgagacatgcacttgctacnaaacacaaatttnatgttgcacccttgtttctacacctgtgggttatgacaaagacaactgccaaagaatnttcaagaaggaggactgccant

SEQ ID NO: 407 - DNA, 413 bp, Homo sapiens
gctgacttgctagtatcatctgcattcattgaagcacaagaacttcatgccttgactcatgtaaatgcaataggattaaaaaataaatttgatatcacatggaaacagacaaaaaatattgtacaacattgcacccagtgtcagattctacacctggccactcaggaagcaagagttaatcccagaggtctatgtcctaatgtgttatggcaaatggatgtcatgcacgtaccttcatttggaaaattgtcatttgtccatgtgacagttgatacttattcacatttcatatgggcaacctgccagacaggagaaagtcttcccatgttaaaagacatttattatcttgttttcctgtcatgggagttccagaaaaagttaaaacagacaatgggccaggttctgtagtaaag

SEQ ID NO: 408 - DNA, 183 bp, Homo sapiens
  misc_feature (1)...(183): n = A,T,C or G
ggagctngccctcaattcctccatntctatgttancatatttaatgtcttttgnnattaatncttaactagttaatccttaaagggctanntaatccttaactagtccctccattgtgagcattatccttccagtattcnccttctnttttatttactccttcctggctacccatgtactntt

SEQ ID NO: 409 - DNA, 250 bp, Homo sapiens
  misc_feature (1)...(250): n = A,T,C or G
cccacgcatgataagctctttatttctgtaagtcctgctaggaaatcatcaaatctgacggtggtttgggggacctgaacaaacctcctgtaattaatcagctttcagtttctccccctagtccctccttcaacaacataggaggatcctccccttctttctgctcacggccttatctaggcttcccagtgcccccaggacagcgtgggctatgtttacagcgcntccttgctgggggggggccntatgc

SEQ ID NO: 410 - DNA, 306 bp, Homo sapiens
  misc_feature (1)...(306): n = A,T,C or G
ggctggtttgcaagaatgaaatgaatgattctacagctaggacttaaccttgaaatggaaagtcttgcaatcccatttgcaggatccgtctgtgcacatgcctctgtagagagcagcattcccagggaccttggaaacagttggcactgtaaggtgcttgctccccaagacacatcctaaaaggtgttgtaatggtgaaaaccgcttccttctttattgccccttcttatttatgtgaacnactggttggctttttttgnatcttttttaaactggaaagttcaattgngaaaatgaatatcntgc

SEQ ID NO: 411 - DNA, 261 bp, Homo sapiens
  misc_feature (1)...(261): n = A,T,C or G
agagatattncttaggtnaaagttcatagagttcccatgaactatatgactggccacacaggatcttttgtatttaaggattctgagattttgcttgagcaggattagataaggctgttctttaaatgtctgaaatggaacagatttcaaaaaaaaaccccacaatctagggtgggaacaaggaaggaaagatgtgaataggctgatgggcaaaaaaccaatttacccatcagttccagccttctctcaaggngaggcaaa

SEQ ID NO: 412 - DNA, 241 bp, Homo sapiens
  misc_feature (1)...(241): n = A,T,C or G
gttcaatgttacctgacatttctacaacaccccactcaccgatgtattcgttgcccagtgggaacataccagcctgaatttggaaaaaataattgtgtttcttgcccaggaaatactacgactgactttgatggctccacaaacataacccagtgtaaaaacagaagatgtggaggggagctgggagatttcactgggtacattgaattcccaaactacccangcaattacccagccaaca

SEQ ID NO: 413 - DNA, 231 bp, Homo sapiens
  misc_feature (1)...(231): n = A,T,C or G
aactcttacaatccaagtgactcatctgtgtgcttgaatcctttccactgtctcatctccctcatccaagtttctagtaccttctctttgttgtgaaggataatcaaactgaacaacaaaaagtttactctcctcatttggaacctaaaaactctcttcttcctgggtctgagggctccaagaatccttgaatcanttctcagatcattggggacaccanatcaggaacct

SEQ ID NO: 414 - DNA, 234 bp, Homo sapiens
actgtccatgaagcactgagcagaagctggaggcacaacgcaccagacactcacagcaaggatggagctgaaaacataacccactctgtcctggaggcactgggaagcctagagaaggctgtgagccaaggagggagggtcttcctttggcatgggatggggatgaagtaaggagagggactggaccccctggaagctgattcactatggggggaggtgtattgaagtcctcca

SEQ ID NO: 415 - DNA, 217 bp, Homo sapiens
  misc_feature (1)...(217): n = A,T,C or G
gcataggattaagactgagtatcttttctacattcttttaactttctaaggggcacttctcaaaacacagaccaggtagcaaatctccactgctctaaggntctcaccaccactttctcacacctagcaatagtagaattcagtcctacttctgaggccagaagaatggttcagaaaaatantggattataaaaaataacaattaagaaaaataatc

SEQ ID NO: 416 - DNA, 213 bp, Homo sapiens
  misc_feature (1)...(213): n = A,T,C or G
atgcatatntaaagganactgcctcgcttttagaagacatctggnctgctctctgcatgaggcacagcagtaaagctctttgattcccagaatcaagaactctccccttcagactattaccgaatgcaaggtggttaattgaaggccactaattgatgctcaaatagaaggatattgactatattggaacagatggagtctctactacaaaag

SEQ ID NO: 417 - DNA, 303 bp, Homo sapiens
  misc_feature (1)...(303): n = A,T,C or G
nagtcttcaggcccatcagggaagttcacactggagagaagtcatacatatgtactgtatgtgggaaaggctttactctgagttcaaatcttcaagcccatcagagagtccacactggagagaagccatacaaatgcaatgagtgtgggaagagcttcaggagggattcccattatcaagttcatctagtggtccacacaggagagaaaccctataaatgtgagatatgtgggaagggcttcantcaaagttcgtatcttcaaatccatcngaaggnccacagtatananaaaccttttaagt

SEQ ID NO: 418 - DNA, 328 bp, Homo sapiens
  misc_feature (1)...(328): n = A,T,C or G
tttttggcggtggtggggcagggacgggacangagtctcactctgttgcccaggctggagtgcacaggcatgatctcggctcactacaacccctgcctcccatgtccaagcgattcttgtgcctcagccttccctgtagctagaattacaggcacatgccaccacacccagctagtttttgtatttttagtagagacagggtttcaccatgttggccaggctggtctcaaactcctnacctcagnggtcaggctggtctcaaactcctgacctcaagtgatctgcccacctcagcctcccaaagtgctangattacaggccgtgagcc

SEQ ID NO: 419 - DNA, 389 bp, Homo sapiens
  misc_feature (1)...(389): n = A,T,C or G
cctcctcaagacggcctgtggtccgcctcccggcaaccaagaagcctgcagtgccatatgacccctgagccatggactggagcctgaaaggcagcgtacaccctgctcctgatcttgctgcttgtttcctctctgtggctccattcatagcacagttgttgcactgaggcttgtgcaggccgagcaaggccaagctggctcaaagagcaaccagtcaactctgccacggtgtgccaggcaccggttctccagccaccaacctcactcgctcccgcaaatggcacatcagttcttctaccctaaaggtaggaccaaagggcatctgcttttctgaagtcctctgctctatcagccatcacgtggcagccactcnggctgtgtcgacgcgg

SEQ ID NO: 420 - DNA, 408 bp, Homo sapiens
gttcctcctaactcctgccagaaacagctctcctcaacatgagagctgcacccctcctcctggccagggcagcaagccttagccttggcttcttgtttctgctttttttctggctagaccgaagtgtactagccaaggagttgaagtttgtgactttggtgtttcggcatggagaccgaagtcccattgacacctttcccactgaccccataaaggaatcctcatggccacaaggatttggccaactcacccagctgggcatggagcagcattatgaacttggagagtatataagaaagagatatagaaaattcttgaatgagtcctataaacatgaacaggtttatattcgaagcacagacgttgaccggactttgatgaagtgctatgacaaacctggcaagcccg

SEQ ID NO: 421 - DNA, 352 bp, Homo sapiens
  misc_feature (1)...(352): n = A,T,C or G
gctcaaaaatctttttactgatnggcatggctacacaatcattgactattacggaggccagaggagaatgaggcctggcctgggagccctgtgcctactanaagcacattagattatccattcactgacagaacaggtcttttttgggtccttcttctccaccacnatatacttgcagtcctccttcttgaagattctttggcagttgtctttgtcataacccacaggtgtagaaacaagggtgcaacatgaaatttctgtttcgtagcaagtgcatgtctcacaagttggcangtctgccactccgagtttattgggtgtttgtttcctttgagatccatgcatttcctgg

SEQ ID NO: 422 - DNA, 337 bp, Homo sapiens
atgccaccatgctggcaatgcagcgggcggtcgaaggcctgcatatccagcccaagctggcgatgatcgacggcaaccgttgcccgaagttgccgatgccagccgaagcggtggtcaagggcgatagcaaggtgccggcgatcgcggcggcgtcaatcctggccaaggtcagccgtgatcgtgaaatggcagctgtcgaattgatctacccgggttatggcatcggcgggcataagggctatccgacaccggtgcacctggaagccttgcagcggctggggccgacgccgattcaccgacgcttcttccgccggtacggctggcctatgaaaattat

SEQ ID NO: 423 - DNA, 310 bp, Homo sapiens
  misc_feature (1)...(310): n = A,T,C or G
gctcaaaaatctttttactgatatggcatggctacacaatcattgactattagaggccagaggagaatgaggcctggcctgggagccctgtgcctactanaagcncattagattatccattcactgacagaacaggtcttttttgggtccttcttctccaccacgatatacttgcagtcctccttcttgaagattctttggcagttgtctttgtcataacccacaggtgtanaaacaagggtgcaacatgaaatttctgtttcgtagcaagtgcatgtctcacagttgtcaagtctgccctccgagttta

SEQ ID NO: 424 - DNA, 370 bp, Homo sapiens
  misc_feature (1)...(370): n = A,T,C or G
gctcaaaaatctttttactgataggcatggctacacaatcattgactattagaggccagaggagaatgaggcctggcctgggagccctgtgcctactagaagcacattagattatccattcactgacagaacaggtcttttttgggtccttcttctccaccacgatatacttgcagtcctccttcttgaagattctttggcagttgtctttgtcataacccacaggtgtagaaacatcctggttgaatctcctggaactccctcattaggtatgaaatagcatgatgcattgcataaagtcacgaaggtggcaaagatcacaacgctgcccagganaacattcattgtgataagcaggactccgtcgacg

SEQ ID NO: 425 - DNA, 216 bp, Homo sapiens
  misc_feature (1)...(216): n = A,T,C or G
aattgctatnntttattttgccactcaaaataattaccaaaaaaaaaaaatnttaaatgataacaacncaacatcaaggnaaananaacaggaatggntgactntgcataaatnggccgaanattatccattatnttaagggttgacttcaggntacagcacacagacaaacatgcccaggaggntntcaggaccgctcgatgtnttntgaggagg

SEQ ID NO: 426 - DNA, 596 bp, Homo sapiens
cttccagtgaggataaccctgttgccccgggccgaggttctccattaggctctgattgattggcagtcagtgatggaagggtgttctgatcattccgactgccccaagggtcgctggccagctctctgttttgctgagttggcagtaggacctaatttgttaattaagagtagatggtgagctgtccttgtattttgattaacctaatggccttcccagcacgactcggattcagctggagacatcacggcaacttttaatgaaatgatttgaagggccattaagaggcacttcccgttattaggcagttcatctgcactgataacttcttggcagctgagctggtcggagctgtggcccaaacgcacacttggcttttggttttgagatacaactcttaatcttttagtcatgcttgagggtggatggccttttcagctttaacccaatttgcactgccttggaagtgtagccaggagaatacactcatatactcgtgggcttagaggccacagcagatgtcattggtctactgcctgagtcccgctggtcccatcccaggaccttccatcggcgagtacctgggagcccgtgct

SEQ ID NO: 427 - DNA, 107 bp, Homo sapiens
  misc_feature (1)...(107): n = A,T,C or G
gaagaattcaagttaggtttattcaaagggcttacngagaatcctanacccaggncccagcccgggagcagccttanagagctcctgtttgactgcccggctcagng

SEQ ID NO: 428 - DNA, 38 bp, Homo sapiens
  misc_feature (1)...(38): n = A,T,C or G
gaacttccnaanaangactttattcactattttacatt

SEQ ID NO: 429 - DNA, 544 bp, Homo sapiens
ctttgctggacggaataaaagtggacgcaagcatgacctcctgatgagggcgctgcatttattgaagagcggctgcagccctgcggttcagattaaaatccgagaattgtatagacgccgatatccacgaactcttgaaggactttctgatttatccacaatcaaatcatcggttttcagtttggatggtggctcatcacctgtagaacctgacttggccgtggctggaatccactcgttgccttccacttcagttacacctcactcaccatcctctcctgttggttctgtgctgcttcaagatactaagcccacatttgagatgcagcagccatctcccccaattcctcctgtccatcctgatgtgcagttaaaaaatctgcccttttatgatgtccttgatgttctcatcaagcccacgagtttagttcaaagcagtattcagcgatttcaagagaagttttttatttttgctttgacacctcaacaagttagagagatatgcatatccagggattttttgccaggtggtaggagagattat

SEQ ID NO: 430 - DNA, 507 bp, Homo sapiens
  misc_feature (1)...(507): n = A,T,C or G
cttatcncaatggggctcccaaacttggctgtgcagtggaaactccgggggaattttgaagaacactgacacccatcttccaccccgacactctgatttaattgggctgcagtgagaacagagcatcaatttaaaaagctgcccagaatgttntcctgggcagcgttgtgatctttgccnccttcgtgactttatgcaatgcatcatgctatttcatacctaatgagggagttccaggagattcaaccaggatgtttctacncctgtgggttatgacaaagacaactgccaaagaatnttcaagaaggaggactgcaagtatatcgtggtggagaagaaggacccaaaaaagacctgttctgtcagtgaatggataatctaatgtgcttctagtaggcacagggctcccaggccaggcctcattctcctctggcctctaatagtcaatgattgtgtagccatgcctatcagtaaaaagatttttgagcaaaaaaaaaaaaaaaaaaa

SEQ ID NO: 431 - DNA, 392 bp, Homo sapiens
  misc_feature (1)...(392): n = A,T,C or G
gaaaattcagaatggataaaaacaaatgaagtacaaaatatttcagatttacatagcgataaacaagaaagcacttatcaggaggacttacaaatggaagtacactctanaaccatcatctatcatggctaaatgtgagattagcacagctgtattatttgtacattgcaaacacctagaaagagatgggaaacaaaatcccaggagttttgtgtgtggagtcctgggttttccaacagacatcattccagcattctgagattagggngattggggatcattctggagttggaatgttcaacaaaagtgatgttgttaggtaaaatgtacaacttctggatctatgcagacattgaaggtgcaatgagtctggcttttactctgctgtttct

SEQ ID NO: 432 - DNA, 387 bp, Homo sapiens
  misc_feature (1)...(387): n = A,T,C or G
ggtatccntacataatcaaatatagctgtagtacatgttttcattggngtagattaccacaaatgcaaggcaacatgtgtagatctcttgtcttattcttttgtctataatactgtattgngtagtccaagctctcggnagtccagccactgngaaacatgctccctttagattaacctcgtggacnctnttgttgnattgtctgaactgtagngccctgtattttgcttctgtctgngaattctgttgcttctggggcatttccttgngatgcagaggaccaccacacagatgacagcaatctgaattgntccaatcacagctgcgattaagacatactgaaatcgtacaggaccgggaacaacgtatagaacactggagtccttt

SEQ ID NO: 433 - DNA, 281 bp, Homo sapiens
  misc_feature (1)...(281): n = A,T,C or G
ttcaactagcanagaanactgcttcagggngtgtaaaatgaaaggcttccacgcagttatctgattaaagaacactaagagagggacaaggctagaagccgcaggatgtctacactatagcaggcnctatttgggttggctggaggagctgtggaaaacatggagagattggcgctggagatcgccgtggctattcctcnttgntattacaccagngaggntctctgtntgcccactggttnnaaaaccgntatacaataatgatagaataggacacacat

SEQ ID NO: 434 - DNA, 484 bp, Homo sapiens
ttttaaaataagcatttagtgctcagtccctactgagtactctttctctcccctcctctgaatttaattctttcaacttgcaatttgcaaggattacacatttcactgtgatgtatattgtgttgcaaaaaaaaaaaagtgtctttgtttaaaattacttggtttgtgaatccatcttgctttttccccattggaactagtcattaacccatctctgaactggtagaaaaacatctgaagagctagtctatcagcatctgacaggtgaattggatggttctcagaaccatttcacccagacagcctgtttctatcctgtttaataaattagtttgggttctctacatgcataacaaaccctgctccaatctgtcacataaaagtctgtgacttgaagtttagtcagcacccccaccaaactttatttttctatgtgttttttgcaacatatgagtgttttgaaaataaagtacccatgtcttta

SEQ ID NO: 435 - DNA, 424 bp, Homo sapiens
gcgccgctcagagcaggtcactttctgccttccacgtcctccttcaaggaagccccatgtgggtagctttcaatatcgcaggttcttactcctctgcctctataagctcaaacccaccaacgatcgggcaagtaaaccccctccctcgccgacttcggaactggcgagagttcagcgcagatgggcctgtggggagggggcaagatagatgagggggagcggcatggtgcggggtgaccccttggagagaggaaaaaggccacaagaggggctgccaccgccactaacggagatggccctggtagagacctttgggggtctggaacctctggactccccatgctctaactcccacactctgctatcagaaacttaaacttgaggattttctctgtttttcactcgcaataaattcagagcaaac

SEQ ID NO: 436 - DNA, 667 bp, Homo sapiens
  misc_feature (1)...(667): n = A,T,C or G
accttgggaanactctcacaatataaagggtcgtagactttactccaaattccaaaaaggtcctggccatgtaatcctgaaagttttcccaaggtagctataaaatccttataagggtgcagcctcttctggaattcctctgatttcaaagtctcactctcaagttcttgaaaacgagggcagttcctgaaaggcaggtatagcaactgatcttcagaaagaggaactgtgtgcaccgggatgggctgccagagtaggataggattccagatgctgacaccttctgggggaaacagggctgccaggtttgtcatagcactcatcaaagtccggtcaacgtctgtgcttcgaatataaacctgttcatgtttataggactcattcaagaattttctatatctctttcttatatactctccaagttcataatgctgctccatgcccagctgggtgagttggccaaatccttgtggccatgaggattcctttatggggtcagtgggaaaggtgtcaatgggacttcggtctccatgccgaaacaccaaagtcacaaacttcaactccttggctagtacacttcggtctagccagaaaaaaagcagaaacaagaagccaaggctaaggcttgctgccctgccaggaggaggggtgcagctctcatgttgag

SEQ ID NO: 437 - DNA, 693 bp, Homo sapiens
ctacgtctcaaccctcatttttaggtaaggaatcttaagtccaaagatattaagtgactcacacagccaggtaaggaaagctggattggcacactaggactctaccataccgggttttgttaaagctcaggttaggaggctgataagcttggaaggaacttcagacagctttttcagatcataaaagataattcttagcccatgttcttctccagagcagacctgaaatgacagcacagcaggtactcctctattttcacccctcttgcttctactctctggcagtcagacctgtgggaggccatgggagaaagcagctctctggatgtttgtacagatcatggactattctctgtggaccatttctccaggttaccctaggtgtcactattggggggacagccagcatctttagctttcatttgagtttctgtctgtcttcagtagaggaaacttttgctcttcacacttcacatctgaacacctaactgctgttgctcctgaggtggtgaaagacagatatagagcttacagtatttatcctatttctaggcactgagggctgtggggtaccttgtggtgccaaaacagatcctgttttaaggacatgttgcttcagagatgtctgtaactatctgggggctctgttggctctttaccctgcatcatgtgctctcttggctgaaaatgacc

SEQ ID NO: 438 - DNA, 360 bp, Homo sapiens
ctgcttatcacaatgaatgttctcctgggcagcgttgtgatctttgccaccttcgtgactttatgcaatgcatcatgctatttcatacctaatgagggagttccaggagattcaaccaggatgtttctacacctgtgggttatgacaaagacaactgccaaagaatcttcaagaaggaggactgcaagtatatctggtggagaagaaggacccaaaaaagacctgttctgtcagtgaatggataatctaatgtgcttctagtaggcacagggctcccaggccaggcctcattctcctctggcctctaatagtcaataattgtgtagccatgcctatcagtaaaaagatttttgagcaaac

SEQ ID NO: 439 - DNA, 431 bp, Homo sapiens
  misc_feature (1)...(431): n = A,T,C or G
gttcctnntaactcctgccagaaacagctctcctcaacatgagagctgcacccctcctcctggccagggcagcaagccttagccttggcttcttgtttctgctttttttctggctagaccgaagtgtactagccaaggagttgaagtttgtgactttggtgtttcggcatggagaccgaagtcccattgacacctttcccactgaccccataaaggaatcctcatggccacaaggatttggccaactcacccagctgggcatggagcagcattatgaacttggagagtatataagaaagagatatagaaaattcttgaatgagtcctataaacatgaacaggtttatattcgaagcacagacgttgaccggactttgatgagtgctatgacaaacctggcagcccgtcgacgcggccgcgaatttagtagt

SEQ ID NO: 440 - DNA, 523 bp, Homo sapiens
agagataaagcttaggtcaaagttcatagagttcccatgaactatatgactggccacacaggatcttttgtatttaaggattctgagattttgcttgagcaggattagataaggctgttctttaaatgtctgaaatggaacagatttcaaaaaaaaaccccacaatctagggtgggaacaaggaaggaaagatgtgaataggctgatgggcaaaaaaccaatttacccatcagttccagccttctctcaaggagaggcaaagaaaggagatacagtggagacatctggaaagttttctccactggaaaactgctactatctgtttttatatttctgttaaaatatatgaggctacagaactaaaaattaaaacctctttgtgtcccttggtcctggaacatttatgttccttttaaagaaacaaaaatcaaactttacagaaagatttgatgtatgtaatacatatagcagctcttgaagtatatatatcatagcaaataagtcatctgatgagaacaagcta

SEQ ID NO: 441 - DNA, 430 bp, Homo sapiens
gttcctcctaactcctgccagaaacagctctcctcaacatgagagctgcacccctcctcctggccagggcagcaagccttagccttggcttcttgtttctgctttttttctggctagaccgaagtgtactagccaaggagttgaagtttgtgactttggtgtttcggcatggagaccgaagtcccattgacacctttcccactgaccccataaaggaatcctcatggccacaaggatttggccaactcacccagctgggcatggagcagcattatgaacttggagagtatataagaaagagatatagaaaattcttgaatgagtcctataaacatgaacaggtttatattcgaagcacagacgttgaccggactttgatgagtgctatgacaaacctggcagcccgtcgacgcggccgcgaatttagtag

SEQ ID NO: 442 - DNA, 362 bp, Homo sapiens
ctaaggaattagtagtgttcccatcacttgtttggagtgtgctattctaaaagattttgatttcctggaatgacaattatattttaactttggtgggggaaagagttataggaccacagtcttcacttctgatacttgtaaattaatcttttattgcacttgttttgaccattaagctatatgtttagaaatggtcattttacggaaaaattagaaaaattctgataatagtgcagaataaatgaattaatgttttacttaatttatattgaactgtcaatgacaaataaaaattctttttgattattttttgttttcatttaccagaataaaaactaagaattaaaagtttgattacagtc

SEQ ID NO: 443 - DNA, 624 bp, Homo sapiens
  misc_feature (1)...(624): n = A,T,C or G
ttttttttttgcaacacaatatacatcacagtgaaatgtgtaatccttgcaaattgcaagttgaaagaattaaattcagaggaggggagagaaagagtactcagtagggactgagcactaaatgcttattttaaaagaaatgtaaagagcagaaagcaattcaggctaccctgccttttgtgctggctagtactccggtcggtgtcagcagcacgtggcattgaacattgcaatgtggagcccaaaccacagaaaatggggtgaaattggccaactttctattaacttggcttcctgttttataaaatattgtgaataatatcacctacttcaaagggcagttatgaggcttaaatgaactaacgcctacaaaacacttaaacatagataacataggtgcaagtactatgtatctggtacatggtaaacatccttattattaaagtcaacgctaaaatgaatgtgtgtgcatatgctaatagtacagagagagggcacttaaaccaactaagggcctggagggaaggtttcctggaaagangatgcttgtgctgggtccaaatcttggtctactatgaccttggccaaattatttaaactttgtccctatctgctaaacagatc

SEQ ID NO: 444 - DNA, 425 bp, Homo sapiens
  misc_feature (1)...(425): n = A,T,C or G
gcacatcattnntcttgcattctttgagaataagaagatcagtaaatagttcagaagtgggaagctttgtccaggcctgtgtgtgaacccaatgttttgcttagaaatagaacaagtaagttcattgctatagcataacacaaaatttgcataagtggtggtcagcaaatccttgaatgctgcttaatgtgagaggttggtaaaatcctttgtgcaacactctaactccctgaatgttttgctgtgctgggacctgtgcatgccagacaaggccaagctggctgaaagagcaaccagccacctctgcaatctgccacctcctgctggcaggatttgtttttgcatcctgtgaagagccaaggaggcaccagggcataagtgagtagacttatggtcgacgcggccgcgaatttagtagtagtaga

SEQ ID NO: 445 - DNA, 414 bp, Homo sapiens
  misc_feature (1)...(414): n = A,T,C or G
catgtttatgnttttggattactttgggcacctagtgtttctaaatcgtctatcattcttttctgtttttcaaaagcagagatggccagagtctcaacaaactgtatcttcaagtctttgtgaaattctttgcatgtggcagattattggatgtagtttcctttaactagcatataaatctggtgtgtttcagataaatgaacagcaaaatgtggtggaattaccatttggaacattgtgaatgaaaaattgtgtctctagattatgtaacaaataactatttcctaaccattgatctttggatttttataatcctactcacaaatgactaggcttctcctcttgtattttgaagcagtgtgggtgctggattgataaaaaaaaaaaaagtcgacgcggccgcgaatttagtag

SEQ ID NO: 446 - DNA, 631 bp, Homo sapiens
  misc_feature (1)...(631): n = A,T,C or G
acaaattagaanaaagtgccagagaacaccacataccttgtccggaacattacaatggcttctgcatgcatgggaagtgtgagcattctatcaatatgcaggagccatcttgcaggtgtgatgctggttatactggacaacactgtgaaaaaaaggactacagtgttctatacgttgttcccggtcctgtacgatttcagtatgtcttaatcgcagctgtgattggaacaattcagattgctgtcatctgtgtggtggtcctctgcatcacaagggccaaactttaggtaatagcattggactgagatttgtaaactttccaaccttccaggaaatgccccagaagcaacagaattcacagacagaagcaaaatacagggcactacagttcagacaatacaacaagagcgtccacgaggttaatctaaagggagcatgtttcacagtggctggactaccgagagcttggactacacaatacagtattatagacaaaagaataagacaagagatctacacatgttgccttgcatttgtggtaatctacaccaatgaaaacatgtactacagctatatttgattatgtatggatatatttgaaatagtatacattgtcttgatgttttttctg

SEQ ID NO: 447 - DNA, 585 bp, Homo sapiens
  misc_feature (1)...(585): n = A,T,C or G
ccttgggaaaantntcacaatataaagggtcgtagactttactccaaattccaaaaaggtcctggccatgtaatcctgaaagttttcccaaggtagctataaaatccttataagggtgcagcctcttctggaattcctctgatttcaaagtctcactctcaagttcttgaaaacgagggcagttcctgaaaggcaggtatagcaactgatcttcagaaagaggaactgtgtgcaccgggatgggctgccagagtaggataggattccagatgctgacaccttctgggggaaacagggctgccaggtttgtcatagcactcatcaaagtccggtcaacgtctgtgcttcgaatataaacctgttcatgtttataggactcattcaagaattttctatatctctttcttatatactctccaagttcataatgctgctccatgcccagctgggtgagttggccaaatccttgtggccatgaggattcctttatggggtcagtgggaaaggtgtcaatgggacttcggtctccatgccgaaacaccaaagtcacaaacttcaactccttggctagtacacttcggtcta

SEQ ID NO: 448 - DNA, 93 bp, Homo sapiens
  misc_feature (1)...(93): n = A,T,C or G
tgctcgtgggtcattctgannnccgaactgaccntgccagccctgccgangggccnccatggctccctagtgccctggagagganggggctag

SEQ ID NO: 449 - DNA, 706 bp, Homo sapiens
  misc_feature (1)...(706): n = A,T,C or G
ccaagttcatgctntgtgctggacgctggacagggggcaaaagcnnttgctcgtgggtcattctgancaccgaactgaccatgccagccctgccgatggtcctccatggctccctagtgccctggagaggaggtgtctagtcagagagtagtcctggaaggtggcctctgngaggagccacggggacagcatcctgcagatggtcgggcgcgtcccattcgccattcaggctgcgcaactgttgggaagggcgatcggtgcgggcctcttcgctattacgccagctggcgaaagggggatgtgctgcaaggcgattaagttgggtaacgccagggttttcccagtcncgacgttgtaaaacgacggccagtgaattgaatttaggtgacnctatagaagagctatgacgtcgcatgcacgcgtacgtaagcttggatcctctagagcggccgcctactactactaaattcgcggccgcgtcgacgtgggatccncactgagagagtggagagtgacatgtgctggacnctgtccatgaagcactgagcagaagctggaggcacaacgcnccagacactcacagctactcaggaggctgagaacaggttgaacctgggaggtggaggttgcaatgagctgagatcaggccnctgcnccccagcatggatgacagagtgaaactccatcttaaaaaaaaaaaaaaaaa

SEQ ID NO: 450 - DNA, 493 bp, Homo sapiens
gagacggagtgtcactctgttgcccaggctggagtgcagcaagacactgtctaagaaaaaacagttttaaaaggtaaaacaacataaaaagaaatatcctatagtggaaataagagagtcaaatgaggctgagaactttacaaagggatcttacagacatgtcgccaatatcactgcatgagcctaagtataagaacaacctttggggagaaaccatcatttgacagtgaggtacaattccaagtcaggtagtgaaatgggtggaattaaactcaaattaatcctgccagctgaaacgcaagagacactgtcagagagttaaaaagtgagttctatccatgaggtgattccacagtcttctcaagtcaacacatctgtgaactcacagaccaagttcttaaaccactgttcaaactctgctacacatcagaatcacctggagagctttacaaactcccattgccgagggtcgacgcggccgcgaatttagtag

SEQ ID NO: 451 - DNA, 501 bp, Homo sapiens
  misc_feature (1)...(501): n = A,T,C or G
gggcgcgtcccattcgccattcaggctgcgcaactgttgggaagggcgatcggtgcgggcctcttcgctattacgccagctggcgaaagggggatgtgctgcaaggcgattaagttgggtaacgccagggttttcccagtcncgacgttgtaaaacgacggccagtgaattgaatttaggtgacnctatagaagagctatgacgtcgcatgcacgcgtacgtaagcttggatcctctagagcggccgcctactactactaaattcgcggccgcgtcgacgtgggatccncactgagagagtggagagtgacatgtgctggacnctgtccatgaagcactgagcagaagctggaggcacaacgcnccagacactcacagctactcaggaggctgagaacaggttgaacctgggaggtggaggttgcaatgagctgagatcaggccnctgcnccccagcatggatgacagagtgaaactccatcttaaaaaaaaaaaaaaaaa

SEQ ID NO: 452 - DNA, 51 bp, Homo sapiens
  misc_feature (1)...(51): n = A,T,C or G
agacggtttcaccnttacaacnccttttaggatgggnnttggggagcaagc

SEQ ID NO: 453 - DNA, 317 bp, Homo sapiens
  misc_feature (1)...(317): n = A,T,C or G
tacatcttgctttttccccattggaactagtcattaacccatctctgaactggtagaaaaacatctgaagagctagtctatcagcatctggcaagtgaattggatggttctcagaaccatttcacccanacagcctgtttctatcctgtttaataaattagtttgggttctctacatgcataacaaaccctgctccaatctgtcacataaaagtctgtgacttgaagtttantcagcacccccaccaaactttatttttctatgtgttttttgcaacatatgagtgttttgaaaataaggtacccatgtctttatta

SEQ ID NO: 454 - DNA, 231 bp, Homo sapiens
ttcgaggtacaatcaactctcagagtgtagtttccttctatagatgagtcagcattaatataagccacgccacgctcttgaaggagtcttgaattctcctctgctcactcagtagaaccaagaagaccaaattcttctgcatcccagcttgcaaacaaaattgttcttctaggtctccacccttcctttttcagtgttccaaagctcctcacaatttcatgaacaacagct

SEQ ID NO: 455 - DNA, 231 bp, Homo sapiens
taccaaagagggcataataatcagtctcacagtagggttcaccatcctccaagtgaaaaacattgttccgaatgggctttccacaggctacacacacaaaacaggaaacatgccaagtttgtttcaacgcattgatgacttctccaaggatcttcctttggcatcgaccacattcaggggcaaagaatttctcatagcacagctcacaatacagggctcctttctcctcta

SEQ ID NO: 456 - DNA, 231 bp, Homo sapiens
ttggcaggtacccttacaaagaagacaccataccttatgcgttattaggtggaataatcattccattcagtattatcgttattattcttggagaaaccctgtctgtttactgtaaccttttgcactcaaattcctttatcaggaataactacatagccactatttacaaagccattggaacctttttatttggtgcagctgctagtcagtccctgactgacattgccaagt

SEQ ID NO: 457 - DNA, 231 bp, Homo sapiens
  misc_feature (1)...(231): n = A,T,C or G
cgaggtacccaggggtctgaaaatctctnntttantagtcgatagcaaaattgttcatcagcattccttaatatgatcttgctataattagatttttctccattagagttcatacagttttatttgattttattagcaatctctttcagaagacccttgagatcattaagctttgtatccagttgtctaaatcgatgcctcatttcctctgaggtgtcgctggcttttgtg

SEQ ID NO: 458 - DNA, 231 bp, Homo sapiens
aggtctggttccccccacttccactcccctctactctctctaggactgggctgggccaagagaagaggggtggttagggaagccgttgagacctgaagccccaccctctaccttccttcaacaccctaaccttgggtaacagcatttggaattatcatttgggatgagtagaatttccaaggtcctgggttaggcattttggggggccagaccccaggagaagaagattct

SEQ ID NO: 459 - DNA, 231 bp, Homo sapiens
ggtaccgaggctcgctgacacagagaaaccccaacgcgaggaaaggaatggccagccacaccttcgcgaaacctgtggtggcccaccagtcctaacgggacaggacagagagacagagcagccctgcactgttttccctccaccacagccatcctgtccctcattggctctgtgctttccactatacacagtcaccgtcccaatgagaaacaagaaggagcaccctccaca

SEQ ID NO: 460 - DNA, 231 bp, Homo sapiens
gcaggtataacatgctgcaacaacagatgtgactaggaacggccggtgacatggggagggcctatcaccctattcttgggggctgcttcttcacagtgatcatgaagcctagcagcaaatcccacctccccacacgcacacggccagcctggagcccacagaagggtcctcctgcagccagtggagcttggtccagcctccagtccacccctaccaggcttaaggatagaa

SEQ ID NO: 461 - DNA, 231 bp, Homo sapiens
cgaggtttgagaagctctaatgtgcaggggagccgagaagcaggcggcctagggagggtcgcgtgtgctccagaagagtgtgtgcatgccagaggggaaacaggcgcctgtgtgtcctgggtggggttcagtgaggagtgggaaattggttcagcagaaccaagccgttgggtgaataagagggggattccatggcactgatagagccctatagtttcagagctgggaatt

SEQ ID NO: 462 - DNA, 231 bp, Homo sapiens
aggtaccctcattgtagccatgggaaaattgatgttcagtggggatcagtgaattaaatggggtcatgcaagtataaaaattaaaaaaaaaagacttcatgcccaatctcatatgatgtggaagaactgttagagagaccaacagggtagtgggttagagatttccagagtcttacattttctagaggaggtatttaatttcttctcactcatccagtgttgtatttagga

SEQ ID NO: 463 - DNA, 231 bp, Homo sapiens
tactccagcctggtgacagagcgagaccctatcaccgccccccaccccaccaaaaaaaaaactgagtagacaggtgtcctcttggcatggtaagtcttaagtcccctcccagatctgtgacatttgacaggtgtcttttcctctggacctcggtgtccccatctgagtgagaaaaggcagtggggaggtggatcttccagtcgaagcggtatagaagcccgtgtgaaaagc

SEQ ID NO: 464 - DNA, 231 bp, Homo sapiens
gtactctaagattttatctaagttgccttttctgggtgggaaagtttaaccttagtgactaaggacatcacatatgaagaatgtttaagttggaggtggcaacgtgaattgcaaacagggcctgcttcagtgactgtgtgcctgtagtcccagctactcgggagtctgtgtgaggccaggggtgccagcgcaccagctagatgctctgtaacttctaggccccattttccc

SEQ ID NO: 465 - DNA, 231 bp, Homo sapiens
catgttgttgtagctgtggtaatgctggctgcatctcagacagggttaacttcagctcctgtggcaaattagcaacaaattctgacatcatatttatggtttctgtatctttgttgatgaaggatggcacaatttttgcttgtgttcataatatactcagattagttcagctccatcagataaactggagacatgcaggacattagggtagtgttgtagctctggtaatga

SEQ ID NO: 466 - DNA, 231 bp, Homo sapiens
caggtacctctttccattggatactgtgctagcaagcatgctctccggggtttttttaatggccttcgaacagaacttgccacatacccaggtataatagtttctaacatttgcccaggacctgtgcaatcaaatattgtggagaattccctagctggagaagtcacaaagactataggcaataatggagaccagtcccacaagatgacaaccagtcgttgtgtgcggctg

SEQ ID NO: 467 - DNA, 311 bp, Homo sapiens
gtacaccctggcacagtccaatctgaactggttcggcactcatctttcatgagatggatgtggtggcttttctcctttttcatcaagactcctcagcagggagcccagaccagcctgcactgtgccttaacagaaggtcttgagattctaagtgggaatcatttcagtgactgtcatgtggcatgggtctctgcccaagctcgtaatgagactatagcaaggcggctgtgggacgtcagttgtgacctgctgggcctcccaatagactaacaggcagtgccagttggacccaagagaagactgcagcagac

SEQ ID NO: 468 - DNA, 3112 bp, Homo sapiens
cattgtgttgggagaaaaacagaggggagatttgtgtggctgcagccgagggagaccaggaagatctgcatggtgggaaggacctgatgatacagagtttgataggagacaattaaaggctggaaggcactggatgcctgatgatgaagtggactttcaaactggggcactactgaaacgatgggatggccagagacacaggagatgagttggagcaagctcaataacaaagtggttcaacgaggacttggaattgcatggagctggagctgaagtttagcccaattgtttactagttgagtgaatgtggatgattggatgatcatttctcatctctgagcctcaggttccccatccataaaatgggatacacagtatgatctataaagtgggatatagtatgatctacttcactgggttatttgaaggatgaattgagataatttatttcaggtgcctagaacaatgcccagattagtacatttggtggaactgagaaatggcataacaccaaatttaatatatgtcagatgttactatgattatcattcaatctcatagttttgtcatggcccaatttatcctcacttgtgcctcaacaaattgaactgttaacaaaggaatctctggtcctgggtaatggctgagcaccactgagcatttccattccagttggcttcttgggtttgctagctgcatcactagtcatcttaaataaatgaagttttaacatttctccagtgatttttttatctcacctttgaagatactatgttatgtgattaaataaagaacttgagaagaacaggtttcattaaacataaaatcaatgtagacgcaaattttctggatgggcaatacttatgttcacaggaaatgctttaaaatatgcagaagataattaaatggcaatggacaaagtgaaaaacttagactttttttttttttttggaagtatctggatgttccttagtcacttaaaggagaactgaaaaatagcagtgagttccacataatccaacctgtgagattaaggctctttgtggggaaggacaaagatctgtaaatttacagtttccttccaaagccaacgtcgaattttgaaacatatcaaagctcttcttcaagacaaataatctatagtacatctttcttatgggatgcacttatgaaaaatggtggctgtcaacatctagtcactttagctctcaaaatggttcattttaagagaaagttttagaatctcatatttattcctgtggaaggacagcattgtggcttggactttataaggtctttattcaactaaataggtgagaaataagaaaggctgctgactttaccatctgaggccacacatctgctgaaatggagataattaacatcactagaaacagcaagatgacaatataatgtctaagtagtgacatgtttttgcacatttccagcccctttaaatatccacacacacaggaagcacaaaaggaagcacagagatccctgggagaaatgcccggccgccatcttgggtcatcgatgagcctcgccctgtgcctggtcccgcttgtgagggaaggacattagaaaatgaattgatgtgttccttaaaggatgggcaggaaaacagatcctgttgtggatatttatttgaacgggattacagatttgaaatgaagtcacaaagtgagcattaccaatgagaggaaaacagacgagaaaatcttgatggcttcacaagacatgcaacaaacaaaatggaatactgtgatgacatgaggcagccaagctggggaggagataaccacggggcagagggtcaggattctggccctgctgcctaaactgtgcgttcataaccaaatcatttcatatttctaaccctcaaaacaaagctgttgtaatatctgatctctacggttccttctgggcccaacattctccatatatccagccacactcatttttaatatttagttcccagatctgtactgtgacctttctacactgtagaataacattactcattttgttcaaagacccttcgtgttgctgcctaatatgtagctgactgtttttcctaaggagtgttctggcccaggggatctgtgaacaggctgggaagcatctcaagatctttccagggttatacttactagcacacagcatgatcattacggagtgaattatctaatcaacatcatcctcagtgtctttgcccatactgaaattcatttcccacttttgtgcccattctcaagacctcaaaatgtcattccattaatatcacaggattaacttttttttttaacctggaagaattcaatgttacatgcagctatgggaatttaattacatattttgttttccagtgcaaagatgactaagtcctttatccctcccctttgtttgattttttttccagtataaagttaaaatgcttagccttgtactgaggctgtatacagccacagcctctccccatccctccagccttatctgtcatcaccatcaacccctcccatgcacctaaacaaaatctaacttgtaattccttgaacatgtcaggcatacattattccttctgcctgagaagctcttccttgtctcttaaatctagaatgatgtaaagttttgaataagttgactatcttacttcatgcaaagaagggacacatatgagattcatcatcacatgagacagcaaatactaaaagtgtaatttgattataagagtttagataaatatatgaaatgcaagagccacagagggaatgtttatggggcacgtttgtaagcctgggatgtgaagcaaaggcagggaacctcatagtatcttatataatatacttcatttctctatctctatcacaatatccaacaagcttttcacagaattcatgcagtgcaaatccccaaaggtaacctttatccatttcatggtgagtgcgctttagaattttggcaaatcatactggtcacttatctcaactttgagatgtgtttgtccttgtagttaattgaaagaaatagggcactcttgtgagccactttagggttcactcctggcaataaagaatttacaaagagcaaaaaaaaaaaaaaaaaaaaaaaa

SEQ ID NO: 469 - DNA, 2229 bp, Homo sapiens
agctctttgtaaattctttattgccaggagtgaaccctaaagtggctcacaagagtgccctatttctttcaattaactacaaggacaaacacatctcaaagttgagataagtgaccagtatgatttgccaaaattctaaagcgcactcaccatgaaatggataaaggttacctttggggatttgcactgcatgaattctgtgaaaagcttgttggatattgtgatagagatagagaaatgaagtatattatataagatactatgaggttccctgcctttgcttcacatcccaggcttacaaacgtgccccataaacattccctctgtggctcttgcatttcatatatttatctaaactcttataatcaaatacacttttagtatttgctgtctcatgtgatgatgaatctcatatgtgtcccttctttgcatgaagtaagatagtcaacttattcaaaactttacatcattctagatttaagagacaaggaagagcttctcaggcagaaggaataatgtatgcctgacatgttcaaggaattacaagttagattttgtttaggtgcatgggaggggttgatggtgatgacagataaggctggagggatggggagaggctgtggctgtatacagcctcagtacaaggctaagcattttaactttatactggaaaaaaaatcaaacaaaggggagggataaaggacttagtcatctttgcactggaaaacaaaatatgtaattaaattcccatagctgcatgtaacattgaattcttccaggttaaaaaaaaagttaatcctgtgatattaatggaatgacattttgaggtcttgagaatgggcacaaaagtgggaaatgaatttcagtatgggcaaagacactgaggatgatgttgattagataattcactccgtaatgatcatgctgtgtgctagtaagtataaccctggaaagatcttgagatgcttcccagcctgttcacagatcccctgggccagaacactccttaggaaaaacagtcagctacatattaggcagcaacacgaagggtctttgaacaaaatgagtaatgttattctacagtgtagaaaggtcacagtacagatctgggaactaaatattaaaaatgagtgtggctggatatatggagaatgttgggcccagaaggaaccgtagagatcagatattacaacagctttgttttgagggttagaaatatgaaatgatttggttatgaacgcacagtttaggcagcagggccagaatcctgaccctctgccccgtggttatctcctccccagcttggctgcctcatgtcatcacagtattccattttgtttgttgcatgtcttgtgaagccatcaagattttctcgtctgttttcctctcattggtaatgctcactttgtgacttcatttcaaatctgtaatcccgttcaaataaatatccacaacaggatctgttttcctgcccatcctttaaggaacacatcaattcattttctaatgtccttccctcacaagcgggaccaggcacagggcgaggctcatcgatgacccaagatggcggccgggcatttctcccagggatctctgtgcttccttttgtgcttcctgtgtgtgtggatatttaaaggggctggaaatgtgcaaaaacatgtcactacttagacattatattgtcatcttgctgtttctagtgatgttaattatctccatttcagcagatgtgtggcctcagatggtaaagtcagcagcctttcttatttctcacctggaaatacatacgaccatttgaggagacaaatggcaaggtgtcagcataccctgaacttgagttgagagctacacacaatattattggtttccgagcatcacaaacaccctctctgtttcttcactgggcacagaattttaatacttatttcagtgggctgttggcaggaacaaatgaagcaatctacataaagtcactagtgcagtgcctgacacacaccattctcttgaggtcccctctagagatcccacaggtcatatgacttcttggggagcagtggctcacacctgtaatcccagcactttgggaggctgaggcaggtgggtcacctgaggtcaggagttcaagaccagcctggccaatatggtgaaaccccatctctactaaaaatacaaaaattagctgggcgtgctggtgcatgcctgtaatcccagccccaacacaatggaatt

SEQ ID NO: 470 - DNA, 2426 bp, Homo sapiens
gtaaattctttattgccaggagtgaaccctaaagtggctcacaagagtgccctatttctttcaattaactacaaggacaaacacatctcaaagttgagataagtgaccagtatgatttgccaaaattctaaagcgcactcaccatgaaatggataaaggttacctttggggatttgcactgcatgaattctgtgaaaagcttgttggatattgtgatagagatagagaaatgaagtatattatataagatactatgaggttccctgcctttgcttcacatcccaggcttacaaacgtgccccataaacattccctctgtggctcttgcatttcatatatttatctaaactcttataatcaaattacacttttagtatttgctgtctcatgtgatgatgaatctcatatgtgtcccttctttgcatgaagtaagatagtcaacttattcaaaactttacatcattctagatttaagagacaaggaagagcttctcaggcagaaggaataatgtatgcctgacatgttcaaggaattacaagttagattttgtttaggtgcatgggaggggttgatggtgatgacagataaggctggagggatggggagaggctgtggctgtatacagcctcagtacaaggctaagcattttaactttatactggaaaaaaaatcaaacaaaggggagggataaaggacttagtcatctttgcactggaaaacaaaatatgtaattaaattcccatagctgcatgtaacattgaattcttccaggttaaaaaaaaaagttaatcctgtgatattaatggaatgacattttgaggtcttgagaatgggcacaaaagtgggaaatgaatttcagtatgggcaaagacactgaggatgatgttgattagataattcactccgtaatgatcatgctgtgtgctagtaagtataaccctggaaagatcttgagatgcttcccagcctgttcacagatcccctgggccagaacactccttaggaaaaacagtcagctacatattaggcagcaacacgaagggtctttgaacaaaatgagtaatgttattctacagtgtagaaaggtcacagtacagatctgggaactaaatattaaaaatgagtgtggctggatatatggagaatgttgggcccagaaggaaccgtagagatcagatattacaacagctttgttttgagggttagaaatatgaaatgatttggttatgaacgcacagtttaggcagcagggccagaatcctgaccctctgccccgtggttatctcctccccagcttggctgcctcatgtcatcacagtattccattttgtttgttgcatgtcttgtgaagccatcaagattttctcgtctgttttcctctcattggtaatgctcactttgtgacttcatttcaaatctgtaatcccgttcaaataaatatccacaacaggatctgttttcctgcccatcctttaaggaacacatcaattcattttctaatgtccttccctcacaagcgggaccaggcacagggcgaggctcatcgatgacccaagatggcggccgggcatttctcccagggatctctgtgcttccttttgtgcttcctgtgtgtgtggatatttaaaggggctggaaatgtgcaaaaacatgtcactacttagacattatattgtcatcttgctgtttctagtgatgttaattatctccatttcagcagatgtgtggcctcagatggtaaagtcagcagcctttcttatttctcacctggaaatacatacgaccatttgaggagacaaatggcaaggtgtcagcataccctgaacttgagttgagagctacacacaatattattggtttccgagcatcacaaacaccctctctgtttcttcactgggcacagaattttaatacttatttcagtgggctgttggcaggaacaaatgaagcaatctacataaagtcactagtgcagtgcctgacacacaccattctcttgaggtcccctctagagatcccacaggtcatatgacttcttggggagcagtggctcacacctgtaatcccagcactttgggaggctgaggcaggtgggtcacctgaggtcaggagttcaagaccagcctggccaatatggtgaaaccccatctctactaaaaatacaaaaattagctgggcgtgctggtgcatgcctgtaatcccagctacttgggaggctgaggcaggagaattgctggaacatgggaggcggaggttgcagtgagctgtaattgtgccattgcactcgaacctgggcgacagagtggaactctgtttccaaaaaacaaacaaacaaaaaaggcatagtcagatacaacgtgggtgggatgtgtaaatagaagcaggatataaagggcatggggtgacggttttgcccaacacaatg

SEQ ID NO: 471 - DNA, 812 bp, Homo sapiens
gaacaaaatgagtaatgttattctacagtgtagaaaggtcacagtacagatctgggaactaaatattaaaaatgagtgtggctggatatatggagaatgttgggcccagaaggaaccgtagagatcagatattacaacagctttgttttgagggttagaaatatgaaatgatttggttatgaacgcacagtttaggcagcagggccagaatcctgaccctctgccccgtggttatctcctccccagcttggctgcctcatgtcatcacagtattccattttgtttgttgcatgtcttgtgaagccatcaagattttctcgtctgttttcctctcattggtaatgctcactttgtgacttcatttcaaatctgtaatcccgttcaaataaatatccacaacaggatctgttttcctgcccatcctttaaggaacacatcaattcattttctaatgtccttccctcacaagcgggaccaggcacagggcgaggctcatcgatgacccaagatggcggccgggcatttctcccagggatctctgtgcttccttttgtgcttcctgtgtgtgtggatatttaaaggggctggaaatgtgcaaaaacatgtcactacttagacattatattgtcatcttgctgtttctagtgatgttaattatctccatttcagcagatgtgtggcctcagatggtaaagtcagcagcctttcttatttctcacctctgtatcatcaggtccttcccaccatgcagatcttcctggtctccctcggctgcagccacacaaatctcccctctgtttttctgatgccag

SEQ ID NO: 472 - DNA, 515 bp, Homo sapiens
  misc_feature (1)...(515): n = A,T,C or G
acggagacttattttctgatattgtctgcatatgtatgtttttaagagtctggaaatagtcttatgactttcctatcatgcttattaataaataatacagcccagagaagatgaaaatgggttccagaattattggtccttgcagcccggtgaatctcagcaagaggaaccaccaactgacaatcaggatattgaacctggacaagagagagaaggaacacctccgatcgaagaacgtaaagtagaaggtgattgccaggaaatggatctggaaaagactcggagtgagcgtggagatggctctgatgtaaaagagaagactccacctaatcctaagcatgctaagactaaagaagcaggagatgggcagccataagttaaaaagaagacaagctgaagctacacacatggctgatgtcacattgaaaatgtgactgaaaatttgaaaattctctcaataaagtttgagttttctctgaagaaaaaaaaanaaaaaaaaaaaanaaaaanaaaaa

SEQ ID NO: 473 - DNA, 5829 bp, Homo sapiens
cgcatgccggggaagcccaagctggctcgaagagccaccagccacctgtgcaagggtgggcctggaccagttggaccagccaccaagctcacctactcaaggaagcagggatggccaggttgcaacagcctgagtggctgccacctgatagctgatggagcagaggcctgaggaaaatcagatggcacatttagctctttaatggatcttaagttaatttttctataaagcacatggcaccagtccatgcctcagagctcgtatggcactgcggaccacagcaggccgagttcccaggattgccatccaggggggccttctgtagccctggccagaccttgcagaggtggctgggtgctctttgagcgagctcggcctccctggcatgcacaggccccaggtactgacacgctgctctgagtgagcttgtcctgccttggctgccacctaactgctgatggagcagcggccttaggaaaagcaaatggcgctgtagcccaactttagggtagaagaagatgtaccatgtccggccgctagttggtgactggtgcacctgctcctggcgtacccttgcagaggtgggtggttgctctttggccagcttggccttgcctggcatgcacaagcctcagtgcaacaactgtcctacaaatggagacacagagaggaaacaagcagcgggctcaggagcagggtgtgtgctgcctttggggctccagtccatgcctcgggtcgtatggtactgcaggcttcttggttgccaagaggcggaccacaggccttcttgaggaggactttacgttcaagtgcagaaagcagccaaaattaccatccatgagactaagccttctgtggccctggcgagacttaaaatttgtgccaaggcaggacaagctcactcggagcagcgtgtcagtagctggggcctatgcatgccgggcagggccgggctggctgaaggagcaaccagccacctctgcaagggtgcgcctagtgcaggcggagcatccaccacctcacccgctcgaggaagtggggatggccaggttcccacagcctgagtgtctgccaccttattgctgatggagcagaggccttaagaaaagcagatggcactgtggccctacctttagggtggaagaagtgatgtacatgtccggacgctaattggtgactggtacaccggctcctgctacacctttgcagaggtggctggttgctctttgagccagcttgtccttgcccggcatgcacaagtttcagtgcaacaactttgccacaaatggagccatatagaggaaacaagaagcaggttcaggagaagggtgtaccctgcctttggggctccagtccatgcctcaggtgtcacatggcactgcgggcttcttggttgccaggaggcggaccacaggccatcttggggaggactttgtgttcaagtgcagaaagcagccaggattgccatccagggggaccttctatagccctggccaaaccttgcaggggtgtctggttgctctttgagccggcttggcctccctggcatgcacgggccccaggtgctggcacgctgctccgagtgtgcttgtcctgccttggctgccacctctgcgggggtgcgtctggagggggtggaccggccaccaaccttacccagtcaaggaagtggatggccatgttcccacagcctgagtggctgccacctgatggctgatggagcaaaggccttaggaaaagcagatggcccttggccctacctttttgttagaagaactgatgttccatgtcctgcagcgagtgaggttggtggctgtgcccccagctcctggcgcgccctcgcagaggtgactggttgctctttgggccctcttggccttgcccagcatgcacaagcctcagtgctactactgtgctacaaatggagccatataggggaaacgagcagccatctcaggagcaaggtgtatgctgcctttgggggctccagtccttgcctcaagggtcttatgtcactgtgggcttcttggttgtcaagaggcagaccataggccgtcttgagagggactttatgttcaagtgcagaaagcagccaggattgccaccctcgggactctgccttctgtggccctggccaaacttagaatttggccgtagacaggacaggctcacttggagtagcgtgtccgtagctggggtctgtgcatgccgggcaaggccgggctggctcggggagcaaccagccacctctgcgggggtgcgcctggagcaggtggagcagccaccagctcacccactccaggaagccggggtagccaggttcccaaggcctgagtgggtgccacctaatggctgaagaaacagaggccttgggaaaaccagatggcactgtggccctacctttatggtagaagagctgatttagcctgactggcagcgtgtggggttggtggctggtctgcctgctgctggcgcatccgtgcaaggatggctggttgccctttgagccagcttgcccttgcccggcatgcgcaagcctcagtgcaacaactgtgctgcaaatggggccatatagaggaaaggagcagctggctctggagcatggtgtgcactccctttgggccttcagtccatgtctcatgggtcgtatgacactgcgggcttgttggttgccaagaggcagaccacaggtcatcttgaggaggactttatgttccagtccagaaagcagccagtggtaccacccaggggacttgtgcttctgtgcccaggccagacgtagaatttgacaaagtcaggacggtctcagtcagagcggcgtgtcggtccccggggcctgtgcatgccgggcagggccgggctggcttggggagcaagcagccacctctgttaagggtgtgcctggagcaggtggagcagccaccaacctcacgcactgaaagaagcagggatggccaggttccaacatcctgagtggctgccacctgatggctgatggagcagaggcctgaggaaaagcagatggcactgctttgtagtgctgttctttgtctctcttgatctttttcagttaatgtctgttttatcagagactaggattgcaaaccctgctcttttttgctttccatttgcttggtaaatattcctccatccctttattttaagcctatgtgtgtctttgcacatgagatgggtctcctgaatacaggacaacaatgggtctttactctttatccaacttgccagtctgtgtcttttaactggggcatttagcccatttacatttaagtttagtattgttacatgtgaaatttatcctgtcatgatgttgctagctttttatttttcccattagtttgcagtttctttatagtgtcaatggtctttacaattcgatatgtttttgtagtggctggtactggtttttcctttctacgtttagtgtctccttcaggagctcttgtaacacaagaatgtggatttatttcttgtaaggtaaatatgtggatttatttcttgggactgtattctatggcctttaccccaagaatcattactttttaaaatgcaattcaaattagcataaaacatttacagcctatggaaaggcttgtggcattagaatccttatttataggattattttgtgtttttttgagatatggtctttgtcatcgaggcagaagtgccgtggtttgatcataattcaccacagccctgaactcttgagtccaagccatccttttgccttaatctcccaaccagttggatctgcaggcataaggcatcatgcgtggctaattttttcacgttttttttttttttttgtcgagattatggtgtcactgtgttgctctggctgatctcaaatgtttgacctcaagggatctttctgccacggcctcctaaagtgctaggattatatgcatgatacaccatgcctattgtagagtattacattattttcaaagtcttattgtaagagccatttattgcctttggcctaaataactcaatataatatctctgaaacttttttttgacaaattttggggcgtgatgatgagagaagggggtttgaaactttctaataagagttaacttagagccatttaagaaaggaaaaaacacaaattatcagaaaaacaacagtaagatcaagtgcaaaagttctgtggcaaagatgatgagagtaaagaatatatgtttgtgactcatggtggcttttactttgttcttgaatttctgagtacgggttaacatttaaagaatctacattatagataacattttattgcaagtaaatgtatttcaaaatttgttattggttttgtatgagattattctcagcctacttcattatcaagctatattattttattaatgtagttcgatgatcttacagcaaagctgaaagctgtatcttcaaaatatgtctatttgactaaaaagttattcaacaggagttattatctataaaaaaaatacaacaggaatataaaaaacttgaggataaaaagatgttggaaaaagtaatattaaatcttaaaaaacatatggaaactacacaatggtgaagacacattggtgaagtacaaaaatataaattggatctagaagaaagggcaatgcaggcaatagaaaaattagtagaaatccctttaaaggttagtttgtaaaatcaggtaagtttatttataatttgctttcatttatttcactgcaaattatattttggatatgtatatatattgtgcttcctctgcctgtcttacagcaatttgccttgcagagttctaggaaaaaggtggcatgtgtttttactttcaaaatatttaaatttccatcattataacaaaatcaatttttcagagtaatgattctcactgtggagtcatttgattattaagacccgttggcataagattacatcctctgactataaaaatcctggaagaaaacctaggaaatattcgtctggacattgcacttggcaatgaatttatgggtaaccactgatccacttccagtcactatccatgagtttttatttccagatacatgaaatcatatgagttgaaactttcttttgattgagcagtttggaaaccgtctttttgtagaatctgcaagtggatatttggaaccctttgaggcctatgctgaaaaaagaaatatcttcactacatgatgaccaccagcagcagctggggaaaccagcaccctgtggaattccatacggtgcatagaatacatcctcccttcagtcggcttgggtcaacttaggtcatgggccacctggctgatagcagtttccacagaaatgcttcaagatgaaagtggatgaccgggccaccctccaccactgccctgtaagaccatgggacacacaggccaccagttcttttcatgtggtcatcccctgttagatgggagaaaatacacctgcctcatttttgtaccttctgtgtgaacattccacggcagactgtcgctaaatgtggatgaagaattgaatgaatgaatgaatatgagagaaaatgaataaatggttcagatcctgggctggaaggctgtgtatgaggatggtgggtagaggagggtctgtttttcttgcctttaagtcactaattgtcactttggggcaggagcacaggctttgaatgcagaccgactggactttaattctggctttactagttgtgattgtgtgaccttgtgaaagttacttaaaccctctgtgcctgtttctttatctgtaaaatggagataataagatgtcaaaggactgtggtaagaattaaatgctttaaaaaaaaaaaaaaaaaa

SEQ ID NO: 474 - DNA, 1594 bp, Homo sapiens
atttatggatcattaatgcctctttagtagtttagagaaaacgtcaaaagaaatggccccagaataagcttcttgatttgtaaaattctatgtcattggctcaaatttgtatagtatctcaaaatataaatatatagacatctcagataatatatttgaaatagcaaattcctgttagaaaataatagtacttaactagatgagaataacaggtcgccattatttgaattgtctcctattcgtttttcatttgttgtgttactcatgttttacttatgagggatatatataacttccactgttttcagaattattgtatgcagtcagtatgagaatgcaatttaagtttccttgatgctttttcacacttctattactagaaataagaatacagtaatattggcaaagaaaattgaccagttcaataaaattttttagtaaatctgattgaaaataaacattgcttatggctttcttacatcaatattgttatgtcctagacaccttatctgaaattacggcttcaaaattctaattatgtgcaaatgtgtaaaatatcaatactttatgttcaagctggggcctcttcaggcgtcctgggctgagagagaaagatgctagctccgcaagccggagagggaacaccgccacattgttacacggacacaccgccacgtggacacatgaccagactcacatgtacagacacacggagacattaccacatggagacaccgtcacacagtcacacggacacactggcatagtcacatggacggacacacagacatatggagaaatcacatggacacaccaccacactatcacagggacacagacacacggagacatcaccacatggacacactgtcacactaccacagggacacgagacatcacactgtcacatggacacaccatcacacacatgaacacaccgacacactgccatatggacactggcacacacactgccacactgtcacatggacacacctccacaccatcacaccaccacacacactgcctgtggacacaaggacacacagacactgtcacacagatacacaaaacactgtcacacggagacatcaccatgcagatacaccaccactctggtgccgtctgaattaccctgctggggggacagcagtggcatactcatgcctaagtgactggctttcaccccagtagtgattgccctccatcaacactgcccaccccaggttggggctaccccagcccatctttacaaaacagggcaaggtgaactaatggagtgggtggaggagttggaagaaatcccagcgtcagtcaccgggatagaattcccaaggaaccctctttttggaggatggtttccatttctggaggcgatctgccgacagggtgaatgccttcttgcttgtcttctggggaatcagagagagtccgttttgtggtgggaagagtgtggctgtgtactttgaactcctgtaaattctctgactcatgtccacaaaaccaacagttttgtgaatgtgtctggaggcaagggaagggccactcaggatctatgttgaagggaagaggcctggggctggagtattcgctt

SEQ ID NO: 475 - DNA, 2414 bp, Homo sapiens
  unsure (33): n=A,T,C or G
cccaacacaatggctttataagaatgcttcacntgtgaaaaacaaatatcaaagtcttcttgtagattatttttaaggacaaatctttattccatgtttaatttatttagctttccctgtagctaatatttcatgctgaacacattttaaatgctgtaaatgtagataatgtaatttatgtatcattaatgcctctttagtagtttagagaaaacgtcaaaagaaatggccccagaataagcttcttgatttgtaaaattctatgtcattggctcaaatttgtatagtatctcaaaatataaatatatagacatctcagataatatatttgaaatagcaaattcctgttagaaaataatagtacttaactagatgagaataacaggtcgccattatttgaattgtctcctattcgtttttcatttgttgtgttactcatgttttacttatggggggatatatataacttccgctgttttcagaagtattgtatgcagtcagtatgagaatgcaatttaagtttccttgatgctttttcacacttctattactagaaataagaatacagtaatattggcaaagaaaattgaccagttcaataaaattttttagtaaatctgattgaaaataaacattgcttatggctttcttacatcaatattgttatgtcctagacaccttatctgaaattacggcttcaaaattctaattatgtgcaaatgtgtaaaatatcaatactttatgttcaagctggggcctcttcaggcgtcctgggctgagagagaaagatgctagctccgcaagccggggagggaacaccgccacattgttacatggacacaccgccacgtggacacatgaccagactcacatgtacagacacacggagacattaccacatggagacaccgtcacacagtcacacgagcacactggcatagtcacatggacggacacacagacatatggagaaatcacactgacacaccaccacactatcacagggacacagacacacggagacatcaccacatggacacactgtcacactaccacagggacacgagacatcacactgtcacatggacacaccatcacacacatgaacacaccgacacactgccatatggacactgccacacacactgccacactgtcacatggacacacctccataccatcacaccaccacacacactgccatgtggacacaaggacacacagacactgtcacacagatacacaaaacactgtcacacggagacatcaccatgcagatacaccaccacatggacatagcaccagacactctgccacacagatacaccaccacacagaaatgcggacacactgccacacagacaccaccacatcgttgccacactttcatgtgtcagctggcggtgtgggccccacgactctgggctctaatcgagaaattacttggacatatagtgaaggcaaaatttttttttattttctgggtaaccaagcgcgactctgtctcaaaaaaagaaaaaaaaagcaatatactgtgtaatcgttgacagcataattcactattatgtagatcggagagcagaggattctgaatgcatgaacatatcattaacatttcaatacattactcataattactgatgaactaaagagaaaccaagaaattatggtgatagttatattgacctggagaaatgtagacacaaaagaaccgtaagatgagaaatgtgttaacacagtctataagggcatgcaagaataaaaataggggagaaaacaggagagtttttcaagagctttctggtcatgtaagtcaacttgtatcggttaatttttaaaaggtttatttacatgcaataaactgcacatacttcaattgtacattttggtaattcttggcatttgtagctctataaaaccagcaacatattaaaatagcaaacatatccattacctttaccaccaaagttttcttgtgttttttctactcactttttcctgcctatccccccatctcttccacaggtaaccactgatccacttccagtcactatccatgagtttttatttccaaatacatgaaatcatatgaatttctggtttttcctgttggagcccaaggagcaagggcagaatgaggaacatgatgtttcttwccgacagttactcatgacgtctccatccaggactgaggggggcatccttctccatctaggactgggggcatccttctccatccagtattgggggtcatccttctccatccagtattgggggtcatcctcctccatccaggacctgaggggtgtccttttctgcgcttccttggatggcagtctttcccttcatgtttatagtracttaccattaaatcactgtgccgttttttcctaaaataaaaaaaaaaaaaaaaa

SEQ ID NO: 476 - DNA, 3434 bp, Homo sapiens
ctgtgctgcaaatggggccatatagaggaaaggagcagctggctctggagcatggtgtgcactccctttgggccttcagtccatgtctcatgggtcgtatgacactgcgggcttgttggttgccaagaggcagaccacaggtcatcttgaggaggactttatgttccagtccagaaagcagccagtggtaccacccaggggacttgtgcttctgtggcccaggccagacgtagaatttgacaaagtcaggacggtctcagtcagagcagcatgtcggtccccggggcctgtgcatgccgggcagggccaggctggcttaaggagcaagcagccacctctgttaggggtgtgcctggagcaggtggagcagccaccaacctcacgcactgaaagaagcagggatggccaggttccaacatcctgagtggctgccacctgatggctgatggagcagaggcctgaggaaaagcagatggcactgctttgtagtgctgttctttgtctctcttgatctttttcagttaatgtctgttttatcagagactaggattgcaaaccctgctcttttttgctttccatttgcttggtaaatattcctccatccctttattttaagcctatgtgtgtctttgcacatgagatgggtctcctgaatacaggacaacaatgggtctttactctttatccaacttgccagtctgtgtcttttaactggggcatttagcccatttacatttaagtttagtatttgttacatgtgaaatttatcctgtcatgatgttgctagctttttatttttcccattagtttgcagtttctttatagtgtcaatggtctttacaattcgatatgtttttgtagtggctggtactggtttttcctttctacgtttagtgtctccttcaggagctcttgtaacacaagaatgtggatttatttcttgtaaggtaaatatgtggatttattctgggactgtattctatggcctttaccccaagaatcattactttttaaaatgcaattcaaattagcataaaacatttacagcctatggaaaggcttgtggcattagaatccttatttataggattattttgtgtttttttgagatatggtctttgtcatcgaggcagaagtgccgtggtttgatcataattcaccacagccctgaactcttgagtccaagccatccttttgccttaatctcccaaccagttggatctacaagcataaggcatcatgcgtggctaattttttcacgttttttttttttttgtcgagattatggtatcactgtgttgctctggctgatctcaaatgtttgacctcaagggatctttctgccacagcctcctaaagtgctaggattatatgcatgatacaccatgcctattgtagagtattacattattttcaaagtcttattgtaagagccatttattgcctttggcctaaataactcaatataatatctctgaaacttttttttgacaaattttggggcgtgatgatgagagaagggggtttgaaactttctaataagagttaacttagagccatttaagaaaggaaaaaacacaaattatcagaaaaacaacagtaagatcaagtgcaaaagttctgtggcaaagatgatgagagtaaagaatatatgtttgtgactcatggtggcttttactttgttcttgaatttctgagtacgggttaacatttaaagaatctacattatagataacattttattgcaagtaaatgtatttcaaaatttgttattggttttgtatgagattattctcagcctacttcattatcaagctatattattttattaatgtagttcgatgatcttacagcaaagctgaaagctgtatcttcaaaatatgtctatttgactaaaaagttattcaacaggagttattatctataaaaaaatacaacaggaatataaaaaacttgaggataaaaagatgttggaaaaagtaatattaaatcttaaaaaacatatggaaactacacaatggtgaagacacattggtgaagtacaaaaatataaattggatctagaagaaagggcaatgcaggcaatagaaaaattagtagaaatccctttaaaggttagtttgtaaaatcaggtaagtttatttataatttgctttcatttatttcactgcaaattatattttggatatgtatatatattgtgcttcctctgcctgtcttacagcaatttgccttgcagagttctaggaaaaaggtggcatgtgtttttactttcaaaatatttaaatttccatcattataacaaaatcaatttttcagagtaatgattctcactgtggagtcatttgattattaagacccgttggcataagattacatcctctgactataaaaatcctggaagaaaacctaggaaatattcgtctggacattgcacttggcaatgaatttatgggcgctttggaatcctgcagatataataatgataattaaacaaaacactcagagaaactgccaaccctaggatgaagtatattgttactgtgctttgggattaaaataagtaactacagtttatagaacttttatactgatacacagacactaaaaagggaaagggtttagatgagaagctctgctatgcaatcaagaatctcagccactcatttctgtaggggctgcaggagctccctgtaaagagaggttatggagtctgtagcttcaggtaagatacttaaaacccttcagagtttctccattttttcccatagtttccccaaaaaggttatgacactttataagaatgcttcacttgtgaaaaacaaatatcaaagtcttcttgtagattatttttaaggacaaatctttattccatgtttaatttatttagctttccctgtagctaatatttcatgctgaacacattttaaatgctgtaaatgtagataatgtaatttatgtatcattaatgcctctttagtagtttagagaaaacgtcaaaagaaatggccccagaataagcttcttgatttgtaaaattctatgtcattggctcaaatttgtatagtatctcaaaatataaatatatagacatctcagataatatatttgaaatagcaaattcctgttagaaaataatagtacttaactagatgagaataacaggtcgccattatttgaattgtctcctattcgtttttcatttgttgtgttactcatgttttacttatggggggatatatataacttccgctgttttcagaagtattgtatgcagtcagtatgagaatgcaatttaagtttccttgatgctttttcacacttctattactagaaataagaatacagtaatattggcaaagaaaattgaccagttcaataaaattttttagtaaatctgattgaaaataaaaaaaaaaaaaaaaaaaaaaaaa

SEQ ID NO: 477 - protein, 140 aa, Homo sapiens
MDGHTDIWRNHMDTPPHYHRDTDTRRHHHMDTLSHYHRDTRHHTVTWTHHHTHEHTDTLPYGHWHTHCHTVTWTHLHTITPPHTLPVDTRTHRHCHTDTQNTVTRRHHHADTPPLWCRLNYPAGGTAVAYSCLSDWLSPQ

SEQ ID NO: 478 - protein, 143 aa, Homo sapiens
MYRHTETLPHGDTVTQSHGHTGIVTWTDTQTYGEITWTHHHTITGTQTHGDITTWTHCHTTTGTRDITLSHGHTITHMNTPTHCHMDTGTHTATLSHGHTSTPSHHHTHCLWTQGHTDTVTQIHKTLSHGDITMQIHHHSGAV

SEQ ID NO: 479 - protein, 222 aa, Homo sapiens
MYRHTETLPHGDTVTQSHEHTGIVTWTDTQTYGEITLTHHHTITGTQTHGDITTWTHCHTTTGTRDITLSHGHTITHMNTPTHCHMDTATHTATLSHGHTSIPSHHHTHCHVDTRTHRHCHTDTQNTVTRRHHHADTPPHGHSTRHSATQIHHHTEMRTHCHTDTTTSLPHFHVSAGGVGPTTLGSNREITWTYSEGKIFFYFLGNQARLCLKKRKKKQYTV

SEQ ID NO: 480 - protein, 144 aa, Homo sapiens [sequence omitted]

SEQ ID NO: 481 - protein, 167 aa, Homo sapiens
MHGPQVLARCSECACPALAATSAGVRLEGVDRPPTLPSQGSGWPCSHSLSGCHLMADGAKALGKADGPWPYLFVRRTDVPCPAASEVGGCAPSSWRALAEVTGCSLGPLGLAQHAQASVLLLCYKWSHIGETSSHLRSKVYAAFGGSSPCLKGLMSLWASWLSRGRP

SEQ ID NO: 482 - protein, 143 aa, Homo sapiens [sequence omitted]

SEQ ID NO: 483 - protein, 143 aa, Homo sapiens
METQRGNKQRAQEQGVCCLWGSSPCLGSYGTAGFLVAKRRTTGLLEEDFTFKCRKQPKLPSMRLSLLWPWRDLKFVPRQDKLTRSSVSVAGAYACRAGPGWLKEQPATSARVRLVQAEHPPPHPLEEVGMARFPQPECLPPYC

SEQ ID NO: 484 - protein, 30 aa, Homo Sapien
TAASDNFQLSQGGQGFAIPIGQAMAIAGQI

SEQ ID NO: 485 - DNA, 31 bp, Artificial Sequence
  Made in a lab
gggaagcttatcacctatgtgccgcctctgc

SEQ ID NO: 486 - DNA, 27 bp, Artificial Sequence
  Made in a lab
gcgaattctcacgctgagtatttggcc

SEQ ID NO: 487 - DNA, 36 bp, Artificial Sequence
  Made in a lab
cccgaattcttagctgcccatccgaacgccttcatc

SEQ ID NO: 488 - DNA, 33 bp, Artificial Sequence
  Made in a lab
gggaagcttcttccccggctgcaccagctgtgc

SEQ ID NO: 489 - protein, 19 aa, Artificial Sequence
  Made in a lab
MDRLVQRFGTRAVYLASVA

SEQ ID NO: 490 - protein, 20 aa, Artificial Sequence
  Made in a lab
YLASVAAFPVAAGATCLSHS

SEQ ID NO: 491 - protein, 20 aa, Artificial Sequence
  Made in a lab
TCLSHSVAVVTASAALTGFT

SEQ ID NO: 492 - protein, 20 aa, Artificial Sequence
  Made in a lab
ALTGFTFSALQILPYTLASL

SEQ ID NO: 493 - protein, 20 aa, Artificial Sequence
  Made in a lab
YTLASLYHREKQVFLPKYRG

SEQ ID NO: 494 - protein, 20 aa, Artificial Sequence
  Made in a lab
LPKYRGDTGGASSEDSLMIS

SEQ ID NO: 495 - protein, 20 aa, Artificial Sequence
  Made in a lab
DSLMTSFLPGPKPGAPFPNG

SEQ ID NO: 496 - protein, 21 aa, Artificial Sequence
  Made in a lab
APFPNGHVGAGGSGLLPPPPA

SEQ ID NO: 497 - protein, 20 aa, Artificial Sequence
  Made in a lab
LLPPPPALCGASACDVSVRV

SEQ ID NO: 498 - protein, 20 aa, Artificial Sequence
  Made in a lab
DVSVRVVVGEPTEARVVPGR

SEQ ID NO: 499 - protein, 20 aa, Artificial Sequence
  Made in a lab
RVVPGRGICLDLAILDSAFL

SEQ ID NO: 500 - protein, 20 aa, Artificial Sequence
  Made in a lab
LDSAFLLSQVAPSLFMGSIV

SEQ ID NO: 501 - protein, 20 aa, Artificial Sequence
  Made in a lab
FMGSIVQLSQSVTAYMVSAA

SEQ ID NO: 502 - DNA, 414 bp, Homo Sapien
  misc_feature (1)...(414): n=A,T,C or G
caccatggagacaggcctgcgctggcttttcctggtcgctgtgctcaaaggtgtccaatgtcagtcggtggaggagtccgggggtcgcctggtcacgcctgggacacctttgacantcacctgtagagtttttggaatngacctcagtagcaatgcaatgagctgggtccgccaggctccagggaaggggctggaatggatcggagccattgataattgtccacantacgcgacctgggcgaaaggccgattnatnatttccaaaacctngaccacggtggatttgaaaatgaccagtccgacaaccgaggacacggccacctatttttgtggcagaatgaatactggtaatagtggttggaagaatatttggggcccaggcaccctggtcaccgtntcctcagggcaacctaa

SEQ ID NO: 503 - DNA, 379 bp, Homo Sapien
  misc_feature (1)...(379): n=A,T,C or G
atncgatggtgcttggtcaaaggtgtccagtgtcagtcggtggaggagtccgggggtcgcctggtcacgcctgggacacccctgacactcacctgcaccgtntctggattngacatcagtagctatggagtgagctgggtccgccaggctccagggaaggggctggnatacatcggatcattagtagtagtggtacattttacgcgagctgggcgaaaggccgattcaccatttccaaaacctngaccacggtggatttgaaaatcaccagtttgacaaccgaggacacggccacctatttntgtgccagaggggggtttaattataaagacatttggggcccaggcaccctggtcaccgtntccttagggcaacctaa

SEQ ID NO: 504 - protein, 19 aa, Artificial Sequence
  Made in a lab
GFTNYTDFEDSPYFKENSA

SEQ ID NO: 505 - protein, 20 aa, Artificial Sequence
  Made in a lab
KENSAFPPFCCNDNVTNTAN

SEQ ID NO: 506 - DNA, 407 bp, Homo Sapien
atggagacaggcctgcgctggcttctcctggtcgctgcgctcaaaggtgtccagtgtcagtcgctggaggagtccgggggtcgcctggtcacgcctgggacacccctgacactcacctgcaccgtctctggattctccctcagtagcaatgcaatgatctgggtccgccaggctccagggaaggggctggaatacatcggatacattagttatggtggtagcgcatactacgcgagctgggtgaaaggccgattcaccatctccaaaacctcgaccacggtggatctgagaatgaccagtctgacaaccgaggacacggccacctatttctgtgccagaaatagtgattttagtggtatgttgtggggcccaggcaccctggtcaccgtctcctcagggcaacctaa

SEQ ID NO: 507 - DNA, 422 bp, Homo Sapien
atggagacaggcctgcgctggcttctcctggtcgctgtgctcaaaggtgtccagtgtcagtcggtggaggagtccgggggtcgcctggtcacgcctgggacacccctgacactcacctgtacagtctctggattctccctcagcaactacgacctgaactgggtccgccaggctccagggaaggggctggaatggatcgggatcattaattatgttggtaggacggactacgcgaactgggcaaaaggccggttcaccatctccaaaacctcgaccaccgtggatctcaagatcgccagtccgacaaccgaggacacggccacctatttctgtgccagagggtggaagtgcgatgagtctggtccgtgcttgcgcatctggggcccaggcaccctggtcaccgtctccttagggcaacctaa

SEQ ID NO: 508 - DNA, 411 bp, Homo Sapien
  misc_feature (1)...(411): n=A,T,C or G
atggagacaggcctcgctggcttctcctggtcgctgtgctcaaaggtgtccagtgtcagtcggtggaggagtccgggggtcgcctggtcacgcctgggacacccctgacactcacctgcacagtctctggaatcgacctcagtagctactgcatgagctgggtccgccaggctccagggaaggggctggaatggatcggaatcattggtactcctggtgacacatactacgcgaggtgggcgaaaggccgattcaccatctccaaaacctcgaccacggtgcatntgaaaatcnccagtccgacaaccgaggacacggccacctatttctgtgccagagatcttcgggatggtagtagtactggttattataaaatctggggcccaggcaccctggtcaccgtctccttgg

SEQ ID NO: 509 - protein, 15 aa, Artificial Sequence
  Made in a lab
LCKFTEWIEKTVQAS

SEQ ID NO: 510 - protein, 15 aa, Artificial Sequence
  Made in a lab
PEYNRPLLANDLMLI

SEQ ID NO: 511 - protein, 15 aa, Artificial Sequence
  Made in a lab
YHPSMFCAGGGQDQK

SEQ ID NO: 512 - protein, 15 aa, Artificial Sequence
  Made in a lab
DSGGPLICNGYLQGL

SEQ ID NO: 513 - protein, 15 aa, Artificial Sequence
  Made in a lab
APCGQVGVPBVYTNL

SEQ ID NO: 514 - protein, 15 aa, Artificial Sequence
  Made in a lab
LCKFTEWIEKTVQAS

SEQ ID NO: 515 - protein, 15 aa, Artificial Sequence
  Made in a lab
MVEASLSVRHPEYNR

SEQ ID NO: 516 - protein, 15 aa, Artificial Sequence
  Made in a lab
VSESDTIRSISIASQ

SEQ ID NO: 517 - protein, 15 aa, Artificial Sequence
  Made in a lab
EVCSKLYDPLYHPSM

SEQ ID NO: 518 - protein, 15 aa, Artificial Sequence
  Made in a lab
RAEPGTEARRHYDEG

SEQ ID NO: 519 - protein, 17 aa, Artificial Sequence
  Made in a lab
RAEPGTEARRNYDEGCG

SEQ ID NO: 520 - protein, 25 aa, Artificial Sequence
  Made in a lab
VGEGLYQGVPRAEPGTEARRHYDEG

SEQ ID NO: 521 - protein, 21 aa, Artificial Sequence
  Made in a lab
APFPNGHVGAGGSGLLPPPPA

SEQ ID NO: 522 - protein, 20 aa, Artificial Sequence
  Made in a lab
LLVVPAIKKDYGSQEDFTQV

SEQ ID NO: 523 - protein, 254 aa, Artificial Sequence
  Made in a lab
  VARIANT (1)...(254): Xaa = any amino acid
MATAGNPWGWFLGYLILGVAGSLVSGSCSQIINGEDCSPHSQPWQAALVMENELFCSGVLVHPQWVLSATHCFQNSYTIGLGLHSLEADQEPGSQMVEASLSVRHPEYNRPLLANDLMLIKLDESVSESDTIRSISIASQCPTAGNSCLVSGWGLLANGRMPTVLQCVNVSVVSEEVCSKLYDPLYHPSMFCAGGGQXQXDSCNGDSGGPLICNGYLQGLVSFGKAPCGQVGVPGVYTNLCKFTEWIEKTVQAS

SEQ ID NO: 524 - DNA, 765 bp, Homo sapien
atggccacagcaggaaatccctggggctggttcctggggtacctcatccttggtgtcgcaggatcgctcgtctctggtagctgcagccaaatcataaacggcgaggactgcagcccgcactcgcagccctggcaggcggcactggtcatggaaaacgaattgttctgctcgggcgtcctggtgcatccgcagtgggtgctgtcagccgcacactgtttccagaactcctacaccatcgggctgggcctgcacagtcttgaggccgaccaagagccagggagccagatggtggaggccagcctctccgtacggcacccagagtacaacagacccttgctcgctaacgacctcatgctcatcaagttggacgaatccgtgtccgagtctgacaccatccggagcatcagcattgcttcgcagtgccctaccgcggggaactcttgcctcgtttctggctggggtctgctggcgaacggcagaatgcctaccgtgctgcagtgcgtgaacgtgtcggtggtgtctgaggaggtctgcagtaagctctatgacccgctgtaccaccccagcatgttctgcgccggcggagggcaagaccagaaggactcctgcaacggtgactctggggggcccctgatctgcaacgggtacttgcagggccttgtgtctttcggaaaagccccgtgtggccaagttggcgtgccaggtgtctacaccaacctctgcaaattcactgagtggatagagaaaaccgtccaggccagttaa

SEQ ID NO: 525 - protein, 254 aa, Homo sapien
MATAGNPWGWFLGYLILGVAGSLVSGSCSQIINGEDCSPHSQPWQAALVMENELFCSGVLVHPQWVLSAAHCFQNSYTIGLGLHSLEADQEPGSQMVEASLSVRHPEYNRPLLANDLMLIKLDESVSESDTIRSISIASQCPTAGNSCLVSGWGLLANGRMPTVLQCVNVSVVSEEVCSKLYDPLYHPSMFCAGGGQDQKDSCNGDSGGPLICNGYLQGLVSFGKAPCGQVGVPGVYTNLCKFTEWIEKTVQAS

SEQ ID NO: 526 - DNA, 963 bp, Homo sapiens
atgagttcctgcaacttcacacatgccacctttgtgcttattggtatcccaggattagagaaagcccatttctgggttggcttccccctcctttccatgtatgtagtggcaatgtttggaaactgcatcgtggtcttcatcgtaaggacggaacgcagcctgcacgctccgatgtacctctttctctgcatgcttgcagccattgacctggccttatccacatccaccatgcctaagatccttgcccttttctggtttgattcccgagagattagctttgaggcctgtcttacccagatgttctttattcatgccctctcagccattgaatccaccatcctgctggccatggcctttgaccgttatgtggccatctgccacccactgcgccatgctgcagtgctcaacaatacagtaacagcccagattggcatcgtggctgtggtccgcggatccctcttttttttcccactgcctctgctgatcaagcggctggccttctgccactccaatgtcctctcgcactcctattgtgtccaccaggatgtaatgaagttggcctatgcagacactttgcccaatgtggtatatggtcttactgccattctgctggtcatgggcgtggacgtaatgttcatctccttgtcctattttctgataatacgaacggttctgcaactgccttccaagtcagagcgggccaaggcctttggaacctgtgtgtcacacattggtgtggtactcgccttctatgtgccacttattggcctctcagttgtacaccgctttggaaacagccttcatcccattgtgcgtgttgtcatgggtgacatctacctgctgctgcctcctgtcatcaatcccatcatctatggtgccaaaaccaaacagatcagaacacgggtgctggctatgttcaagatcagctgtgacaaggacttgcaggctgtgggaggcaagtga

SEQ ID NO: 527 - protein, 320 aa, Homo sapiens
MSSCNFTHATFVLIGIPGLEKAHFWVGFPLLSMYVVAMFGNCIVVFIVRTERSLHAPMYLFLCMLAAIDLALSTSTMPKILALFWFDSREISFEACLTQMFFIHALSAIESTILLAMAFDRYVAICHPLRHAAVLNNTVTAQIGIVAVVRGSLFFFPLPLLIKRLAFCHSNVLSHSYCVHQDVMKLAYADTLPNVVYGLTAILLVMGVDVMFISLSYFLIIRTVLQLPSKSERAKAFGTCVSHIGVVLAFYVPLIGLSVVHRFGNSLHPIVRVVMGDIYLLLPPVINPIIYGAKTKQIRTRVLAMFKISCDKDLQAVGGK

SEQ ID NO: 528 - DNA, 20 bp, Homo Sapien
actatggtccagaggctgtg

SEQ ID NO: 529 - DNA, 20 bp, Homo Sapien
atcacctatgtgccgcctct

SEQ ID NO: 530 - DNA, 1852 bp, Homo sapiens
ggcacgagaattaaaaccctcagcaaaacaggcatagaagggacataccttaaagtaataaaaaccacctatgacaagcccacagccaacataatactaaatggggaaaagttagaagcatttcctctgagaactgcaacaataaatacaaggatgctggattttgtcaaatgccttttctgtgtctgttgagatgcttatgtgactttgcttttaattctgtttatgtgattatcacatttattgacttgcctgtgttagaccggaagagctggggtgtttctcaggagccaccgtgtgctgcggcagcttcgggataacttgaggctgcatcactggggaagaaacacaytcctgtccgtggcgctgatggctgaggacagagcttcagtgtggcttctctgcgactggcttcttcggggagttcttccttcatagttcatccatatggctccagaggaaaattatattattttgttatggatgaagagtattacgttgtgcagatatactgcagtgtcttcatctcttgatgtgtgattgggtaggttccaccatgttgccgcagatgacatgatttcagtacctgtgtctggctgaaaagtgtttgtttgtgaatggatattgtggtttctggatctcatcctctgtgggtggacagctttctccaccttgctggaagtgacctgctgtccagaagtttgatggctgaggagtataccatcgtgcatgcatctttcatttcctgcatttcttcctccctggatggacagggggagcggcaagagcaacgtgggcacttctggagaccacaacgactcctctgtgaagacgcttgggagcaagaggtgcaagtggtgctgccactgcttcccctgctgcagggggagcggcaagagcaacgtggtcgcttggggagactacgatgacagcgccttcatggatcccaggtaccacgtccatggagaagatctggacaagctccacagagctgcctggtggggtaaagtccccagaaaggatctcatcgtcatgctcagggacacggatgtgaacaagagggacaagcaaaagaggactgctctacatctggcctctgccaatgggaattcagaagtagtaaaactcgtgctggacagacgatgtcaacttaatgtccttgacaacaaaaagaggacagctctgacaaaggccgtacaatgccaggaagatgaatgtgcgttaatgttgctggaacatggcactgatccaaatattccagatgagtatggaaataccactctacactatgctgtctacaatgaagataaattaatggccaaagcactgctcttatacggtgctgatatcgaatcaaaaaacaagcatggcctcacaccactgctacttggtatacatgagcaaaaacagcaagtggtgaaatttttaatcaagaaaaaagcgaatttaaatgcgctggatagatatggaagaactgctctcatacttgctgtatgttgtggatcagcaagtatagtcagccctctacttgagcaaaatgttgatgtatcttctcaagatctggaaagacggccagagagtatgctgtttctagtcatcatcatgtaatttgccagttactttctgactacaaagaaaaacagatgttaaaaatctcttctgaaaacagcaatccagaacaagacttaaagctgacatcagaggaagagtcacaaaggcttaaaggaagtgaaaacagccagccagagctagaagatttatggctattgaagaagaatgaagaacacggaagtactcatgtgggattcccagaaaacctgactaacggtgccgctgctggcaatggtgatga

SEQ ID NO: 531 - DNA, 879 bp, Homo sapiens
atgcatctttcatttcctgcatttcttcctccctggatggacagggggagcggcaagagcaacgtgggcacttctggagaccacaacgactcctctgtgaagacgcttgggagcaagaggtgcaagtggtgctgccactgcttcccctgctgcagggggagcggcaagagcaacgtggtcgcttggggagactacgatgacagcgccttcatggatcccaggtaccacgtccatggagaagatctggacaagctccacagagctgcctggtggggtaaagtccccagaaaggatctcatcgtcatgctcagggacacggatgtgaacaagagggacaagcaaaagaggactgctctacatctggcctctgccaatgggaattcagaagtagtaaaactcgtgctggacagacgatgtcaacttaatgtccttgacaacaaaaagaggacagctctgacaaaggccgtacaatgccaggaagatgaatgtgcgttaatgttgctggaacatggcactgatccaaatattccagatgagtatggaaataccactctacactatgctgtctacaatgaagataaattaatggccaaagcactgctcttatacggtgctgatatcgaatcaaaaaacaagcatggcctcacaccactgctacttggtatacatgagcaaaaacagcaagtggtgaaatttttaatcaagaaaaaagcgaatttaaatgcgctggatagatatggaagaactgctctcatacttgctgtatgttgtggatcagcaagtatagtcagccctctacttgagcaaaatgttgatgtatcttctcaagatctggaaagacggccagagagtatgctgtttctagtcatcatcatgtaa

SEQ ID NO: 532 - protein, 292 aa, Homo sapiens
MHLSFPAFLPPWMDRGSGKSNVGTSGDHNDSSVKTLGSKRCKWCCHCFPCCRGSGKSNVVAWGDYDDSAFMDPRYHVHGEDLDKLHRAAWWGKVPRKDLIVMLRDTDVNKRDKQKRTALHLASANGNSEVVKLVLDRRCQLNVLDNKKRTALTKAVQCQEDECALMLLEHGTDPNIPDEYGNTTLHYAVYNEDKLMAKALLLYGADIESKNKHGLTPLLLGIHEQKQQVVKFLIKKKANLNALDRYGRTALILAVCCGSASIVSPLLEQNVDVSSQDLERRPESMLFLVIIM

SEQ ID NO: 533 - DNA, 801 bp, Homo sapiens
atgtacaagcttcagtgcaacaactgtgctacaaatggagccacagagaggaaacaagcagcaggctcaggagcagggtatgcgctgccttcggctctccaatccatgcctcagggctcctatgccactgcacgattcttggttgccaagaggccaaccacaggccatcttgagaaggagtttatgttccactgcagaaagcagccaggatcaccatccaggggacttggtcttctgtggccctggccagacatagaatttgtgccaaggcaggacaagctcactcagagcagcgtgttagtacctcaaatctgtgcgtgccagacaaggccaaactggctcaatgagcaaccagccacctctgcaggggtgcgtctggaggaggtggaccagccaccaaccttacccagtcaaggaagtggatggccatgttcccacagcctgagtggctgccacctgatggctgatatagcaaaggccttaggaaaagcagatggcccttggccctacctttttgttagaagaactgatgttccatgtcctgcagcgagtgaggttggtggctgtgcccccagctcctggcacaccctcgcagaggtgactggttgctctttgagccctcttagccttgcccagcatgcacaagcctcagtgctactactgtgctacaaatggagccatataggggaaacgagcagccatctcaggagcaaggtgtatgctgcctttgggggctccagtccttgcctcaagggtcttatgtcactgtgggcttcttggttgccaagaggcagaccatag

SEQ ID NO: 534 - protein, 266 aa, Homo sapiens [sequence omitted]

SEQ ID NO: 535 - DNA, 6082 bp, Homo sapiens
cctccactattacagcttataggaaattacaatccactttacaggcctcaaaggttcattctggccgagcggacaggcgtggcggccggagccccagcatccctgcttgaggtccaggagcggagcccgcggccactgccgcctgatcagcgcgaccccggcccgcgcccgccccgcccggcaagatgctgcccgtgtaccaggaggtgaagcccaacccgctgcaggacgcgaacctctgctcacgcgtgttcttctggtggctcaatcccttgtttaaaattggccataaacggagattagaggaagatgatatgtattcagtgctgccagaagaccgctcacagcaccttggagaggagttgcaagggttctgggataaagaagttttaagagctgagaatgacgcacagaagccttctttaacaagagcaatcataaagtgttactggaaatcttatttagttttgggaatttttacgttaattgaggaaagtgccaaagtaatccagcccatatttttgggaaaaattattaattattttgaaaattatgatcccatggattctgtggctttgaacacagcgtacgcctatgccacggtgctgactttttgcacgctcattttggctatactgcatcacttatatttttatcacgttcagtgtgctgggatgaggttacgagtagccatgtgccatatgatttatcggaaggcacttcgtcttagtaacatggccatggggaagacaaccacaggccagatagtcaatctgctgtccaatgatgtgaacaagtttgatcaggtgacagtgttcttacacttcctgtgggcaggaccactgcaggcgatcgcagtgactgccctactctggatggagataggaatatcgtgccttgctgggatggcagttctaatcattctcctgcccttgcaaagctgttttgggaagttgttctcatcactgaggagtaaaactgcaactttcacggatgccaggatcaggaccatgaatgaagttataactggtataaggataataaaaatgtacgcctgggaaaagtcattttcaaatcttattaccaatttgagaaagaaggagatttccaagattctgagaagttcctgcctcagggggatgaatttggcttcgtttttcagtgcaagcaaaatcatcgtgtttgtgaccttcaccacctacgtgctcctcggcagtgtgatcacagccagccgcgtgttcgtggcagtgacgctgtatggggctgtgcggctgacggttaccctcttcttcccctcagccattgagagggtgtcagaggcaatcgtcagcatccgaagaatccagacctttttgctacttgatgagatatcacagcgcaaccgtcagctgccgtcagatggtaaaaagatggtgcatgtgcaggattttactgctttttgggataaggcatcagagaccccaactctacaaggcctttcctttactgtcagacctggcgaattgttagctgtggtcggccccgtgggagcagggaagtcatcactgttaagtgccgtgctcggggaattggccccaagtcacgggctggtcagcgtgcatggaagaattgcctatgtgtctcagcagccctgggtgttctcgggaactctgaggagtaatattttatttgggaagaaatacgaaaaggaacgatatgaaaaagtcataaaggcttgtgctctgaaaaaggatttacagctgttggaggatggtgatctgactgtgataggagatcggggaaccacgctgagtggagggcagaaagcacgggtaaaccttgcaagagcagtgtatcaagatgctgacatctatctcctggacgatcctctcagtgcagtagatgcggaagttagcagacacttgttcgaactgtgtatttgtcaaattttgcatgagaagatcacaattttagtgactcatcagttgcagtacctcaaagctgcaagtcagattctgatattgaaagatggtaaaatggtgcagaaggggacttacactgagttcctaaaatctggtatagattttggctcccttttaaagaaggataatgaggaaagtgaacaacctccagttccaggaactcccacactaaggaatcgtaccttctcagagtcttcggtttggtctcaacaatcttctagaccctccttgaaagatggtgctctggagagccaagatacagagaatgtcccagttacactatcagaggagaaccgttctgaaggaaaagttggttttcaggcctataagaattacttcagagctggtgctcactggattgtcttcattttccttattctcctaaacactgcagctcaggttgcctatgtgcttcaagattggtggctttcatactgggcaaacaaacaaagtatgctaaatgtcactgtaaatggaggaggaaatgtaaccgagaagctagatcttaactggtacttaggaatttattcaggtttaactgtagctaccgttctttttggcatagcaagatctctattggtattctacgtccttgttaactcttcacaaactttgcacaacaaaatgtttgagtcaattctgaaagctccggtattattctttgatagaaatccaataggaagaattttaaatcgtttctccaaagacattggacacttggatgatttgctgccgctgacgtttttagatttcatccagacattgctacaagtggttggtgtggtctctgtggctgtggccgtgattccttggatcgcaatacccttggttccccttggaatcattttcatttttcttcggcgatattttttggaaacgtcaagagatgtgaagcgcctggaatctacaactcggagtccagtgttttcccacttgtcatcttctctccaggggctctggaccatccgggcatacaaagcagaagagaggtgtcaggaactgtttgatgcacaccaggatttacattcagaggcttggttcttgtttttgacaacgtcccgctggttcgccgtccgtctggatgccatctgtgccatgtttgtcatcatcgttgcctttgggtccctgattctggcaaaaactctggatgccgggcaggttggtttggcactgtcctatgccctcacgctcatggggatgtttcagtggtgtgttcgacaaagtgctgaagttgagaatatgatgatctcagtagaaagggtcattgaatacacagaccttgaaaaagaagcaccttgggaatatcagaaacgcccaccaccagcctggccccatgaaggagtgataatctttgacaatgtgaacttcatgtacagtccaggtgggcctctggtactgaagcatctgacagcactcattaaatcacaagaaaaggttggcattgtgggaagaaccggagctggaaaaagttccctcatctcagccctttttagattgtcagaacccgaaggtaaaatttggattgataagatcttgacaactgaaattggacttcacgatttaaggaagaaaatgtcaatcatacctcaggaacctgttttgttcactggaacaatgaggaaaaacctggatccctttaatgagcacacggatgaggaactgtggaatgccttacaagaggtacaacttaaagaaaccattgaagatcttcctggtaaaatggatactgaattagcagaatcaggatccaattttagtgttggacaaagacaactggtgtgccttgccagggcaattctcaggaaaaatcagatattgattattgatgaagcgacggcaaatgtggatccaagaactgatgagttaatacaaaaaaaatccgggagaaatttgcccactgcaccgtgctaaccattgcacacagattgaacaccattattgacagcgacaagataatggttttagattcaggaagactgaaagaatatgatgagccgtatgttttgctgcaaaataaagagagcctattttacaagatggtgcaacaactgggcaaggcagaagccgctgccctcactgaaacagcaaaacaggtatacttcaaaagaaattatccacatattggtcacactgaccacatggttacaaacacttccaatggacagccctcgaccttaactattttcgagacagcactgtgaatccaaccaaaatgtcaagtccgttccgaaggcatttgccactagtttttggactatgtaaaccacattgtacttttttttactttggcaacaaatatttatacatacaagatgctagttcatttgaatatttctcccaacttatccaaggatctccagctctaacaaaatggtttatttttatttaaatgtcaatagttgttttttaaaatccaaatcagaggtgcaggccaccagttaaatgccgtctatcaggttttgtgccttaagagactacagagtcaaagctcatttttaaaggagtaggacagagttgtcacaggtttttgttgttgtttttattgcccccaaaattacatgttaatttccatttatatcagggattctatttacttgaagactgtgaagttgccattttgtctcattgttttctttgacataactaggatccattatttcccctgaaggcttcttgttagaaaatagtacagttacaaccaataggaacaacaaaaagaaaaagtttgtgacattgtagtagggagtgtgtaccccttactccccatcaaaaaaaaaaatggatacatggttaaaggatagaagggcaatattttatcatatgttctaaaagagaaggaagagaaaatactactttctcaaaatggaagcccttaaaggtgctttgatactgaaggacacaaatgtgaccgtccatcctcctttagagttgcatgacttggacacggtaactgttgcagttttagactcagcattgtgacacttcccaagaaggccaaacctctaaccgacattcctgaaatacgtggcattattcttttttggatttctcatttatggaaggctaaccctctgttgactgtaagccttttggtttgggctgtattgaaatcctttctaaattgcatgaataggctctgctaacgtgatgagacaaactgaaaattattgcaagcattgactataattatgcagtacgttctcaggatgcatccaggggttcattttcatgagcctgtccaggttagtttactcctgaccactaatagcattgtcatttgggctttctgttgaatgaatcaacaaaccacaatacttcctgggaccttttgtactttatttgaactatgagtctttaatttttcctgatgatggtggctgtaatatgttgagttcagtttactaaaggttttactattatggtttgaagtggagtctcatgacctctcagaataaggtgtcacctccctgaaattgcatatatgtatatagacatgcacacgtgtgcatttgtttgtatacatatatttgtccttcgtatagcaagttttttgctcatcagcagagagcaacagatgttttattgagtgaagccttaaaaagcacacaccacacacagctaactgccaaaatacattgaccgtagtagctgttcaactcctagtacttagaaatacacgtatggttaatgttcagtccaacaaaccacacacagtaaatgtttattaatagtcatggttcgtattttaggtgactgaaattgcaacagtgatcataatgaggtttgttaaaatgatagctatattcaaaatgtctatatgtttatttggacttttgaggttaaagacagtcatataaacgtcctgtttctgttttaatgttatcatagaattttttaatgaaactaaattcaattgaaataaatgatagttttcatctccaaaaaaaaaaaaaaaaagggcggccgctcgagtctagagggcccgtttaaacccgctgatcagcctcgactgtgccttctagttgccagccatctgttgtttgcccctcccccgtgccttccttgaccctggaaggtgccactcccactgtcctttcctaataaaatgaggaaattgcatc

SEQ ID NO: 536 - DNA, 6140 bp, Homo sapiens
  misc_feature (1)...(6140): n=A,T,C or G
cagtggcgcagtctcagctcactgcagcctccacctcctgtgttcaagcagtcctcctgcctcagccaccagactagcaggtctcccccgcctctttcttggaaggacacttgccattggatttaggacccacttggataatccaggatgatgtcttcactccaacatcctcagtttaattccatgtgcaaatacccttttcccaaataacattcaattctttaccaggaaaggtggctcaatcccttgtttaaaattggccataaacggagattagaggaagatgatatgtattcagtgctgccagaagaccgctcacagcaccttggagaggagttgcaagggttctgggataaagaagttttaagagctgagaatgacgcacagaagccttctttaacaagagcaatcataaagtgttactggaaatcttatttagttttgggaatttttacgttaattgaggaaagtgccaaagtaatccagcccatatttttgggaaaaattattaattattttgaaaattatgatcccatggattctgtggctttgaacacagcgtacgcctatgccacggtgctgactttttgcacgctcattttggctatactgcatcacttatatttttatcacgttcagtgtgctgggatgaggttacgagtagccatgtgccatatgatttatcggaaggcacttcgtcttagtaacatggccatggggaagacaaccacaggccagatagtcaatctgctgtccaatgatgtgaacaagtttgatcaggtgacagtgttcttacacttcctgtgggcaggaccactgcaggcgatcgcagtgactgccctactctggatggagataggaatatcgtgccttgctgggatggcagttctaatcattctcctgcccttgcaaagctgttttgggaagttgttctcatcactgaggagtaaaactgcaactttcacggatgccaggatcaggaccatgaatgaagttataactggtataaggataataaaaatgtacgcctgggaaaagtcattttcaaatcttattaccaatttgagaaagaaggagatttccaagattctgagaagttcctgcctcagggggatgaatttggcttcgtttttcagtgcaagcaaaatcatcgtgtttgtgaccttcaccacctacgtgctcctcggcagtgtgatcacagccagccgcgtgttcgtggcagtgacgctgtatggggctgtgcggctgacggttaccctcttcttcccctcagccattgagagggtgtcagaggcaatcgtcagcatccgaagaatccagacctttttgctacttgatgagatatcacagcgcaaccgtcagctgccgtcagatggtaaaaagatggtgcatgtgcaggattttactgctttttgggataaggcatcagagaccccaactctacaaggcctttcctttactgtcagacctggcgaattgttagctgtggtcggccccgtgggagcagggaagtcatcactgttaagtgccgtgctcggggaattggccccaagtcacgggctggtcagcgtgcatggaagaattgcctatgtgtctcagcagccctgggtgttctcgggaactctgaggagtaatattttatttgggaagaaatacgaaaaggaacgatatgaaaaagtcataaaggcttgtgctctgaaaaaggatttacagctgttggaggatggtgatctgactgtgataggagatcggggaaccacgctgagtggagggcagaaagcacgggtaaaccttgcaagagcagtgtatcaagatgctgacatctatctcctggacgatcctctcagtgcagtagatgcggaagttagcagacacttgttcgaactgtgtatttgtcaaattttgcatgagaagatcacaattttagtgactcatcagttgcagtacctcaaagctgcaagtcagattctgatattgaaagatggtaaaatggtgcagaaggggacttacactgagttcctaaaatctggtatagattttggctcccttttaaagaaggataatgaggaaagtgaacaacctccagttccaggaactcccacactaaggaatcgtaccttctcagagtcttcggtttggtctcaacaatcttctagaccctccttgaaagatggtgctctggagagccaagatacagagaatgtcccagttacactatcagaggagaaccgttctgaaggaaaagttggttttcaggcctataagaattacttcagagctggtgctcactggattgtcttcattttccttattctcctaaacactgcagctcaggttgcctatgtgcttcaagattggtggctttcatactgggcaaacaaacaaagtatgctaaatgtcactgtaaatggaggaggaaatgtaaccgagaagctagatcttaactggtacttaggaatttattcaggtttaactgtagctaccgttctttttggcatagcaagatctctattggtattctacgtccttgttaactcttcacaaactttgcacaacaaaatgtttgagtcaattctgaaagctccggtattattctttgatagaaatccaataggaagaattttaaatcgtttctccaaagacattggacacttggatgatttgctgccgctgacgtttttagatttcatccagacattgctacaagtggttggtgtggtctctgtggctgtggccgtgattccttggatcgcaatacccttggttccccttggaatcattttcatttttcttcggcgatattttttggaaacgtcaagagatgtgaagcgcctggaatctacaactcggagtccagtgttttcccacttgtcatcttctctccaggggctctggaccatccgggcatacaaagcagaagagaggtgtcaggaactgtttgatgcacaccaggatttacattcagaggcttggttcttgtttttgacaacgtcccgctggttcgccgtccgtctggatgccatctgtgccatgtttgtcatcatcgttgcctttgggtccctgattctggcaaaaactctggatgccgggcaggttggtttggcactgtcctatgccctcacgctcatggggatgtttcagtggtgtgttcgacaaagtgctgaagttgagaatatgatgatctcagtagaaagggtcattgaatacacagaccttgaaaaagaagcaccttgggaatatcagaaacgcccaccaccagcctggccccatgaaggagtgataatctttgacaatgtgaacttcatgtacagtccaggtgggcctctggtactgaagcatctgacagcactcattaaatcacaagaaaaggttggcattgtgggaagaaccggagctggaaaaagttccctcatctcagccctttttagattgtcagaacccgaaggtaaaatttggattgataagatcttgacaactgaaattggacttcacgatttaaggaagaaaatgtcaatcatacctcaggaacctgttttgttcactggaacaatgaggaaaaacctggatccctttaatgagcacacggatgaggaactgtggaatgccttacaagaggtacaacttaaagaaaccattgaagatcttcctggtaaaatggatactgaattagcagaatcaggatccaattttagtgttggacaaagacaactggtgtgccttgccagggcaattctcaggaaaaatcagatattgattattgatgaagcgacggcaaatgtggatccaagaactgatgagttaatacaaaaaaaaatccgggagaaatttgcccactgcaccgtgctaaccattgcacacagattgaacaccattattgacagcgacaagataatggttttagattcaggaagactgaaagaatatgatgagccgtatgttttgctgcaaaataaagagagcctattttacaagatggtgcaacaactgggcaaggcagaagccgctgccctcactgaaacagcaaaacagagatggggtttcaccatgttggccaggctggtctcaaactcctgacctcaagtgatccacctgccttggcctcccaaactgctgagattacaggtgtgagccaccacgcccagcctgagtatacttcaaaagaaattatccacatattggtcacactgaccacatggttacaaacacttccaatggacagccctcgaccttaactattttcgagacagcactgtgaatccaaccaaaatgtcaagtccgttccgaaggcatttgccactagtttttggactatgtaaaccacattgtacttttttttactttggcaacaaatatttatacatacaagatgctagttcatttgaatatttctcccaacttatccaaggatctccagctctaacaaaatggtttatttttatttaaatgtcaatagtkgktttttaaaatccaaatcagaggtgcaggccaccagttaaatgccgtctatcaggttttgtgccttaagagactacagnagtcagaagctcatttttaaaggagtaggacagagttgtcacaggtttttgttggtgtttktattgcccccaaaattacatgttaatttccatttatatcaggggattctatttacttgaagactgtgaagttgccattttgtctcattgttttctttgacatamctaggatccattatttcccctgaaggcttcttgkagaaaatagtacagttacaaccaataggaactamcaaaaagaaaaagtttgtgacattgtagtagggagtgtgtaccccttactccccatcaaaaaaaaaaatggatacatggttaaaggatagaagggcaatattttatcatatgttctaaaagagaaggaagagaaaatactactttctcaaaatggaagcccttaaaggtgctttgatactgaaggacacaaatgtgaccgtccatcctcctttagagttgcatgacttggacacggtaactgttgcagttttagactcagcattgtgacacttcccaagaaggccaaacctctaaccgacattcctgaaatacgtggcattattcttttttggatttctcatttaggaaggctaaccctctgttgamtgtamkccttttggtttgggctgtattgaaatcctttctaaattgcatgaataggctctgctaaccgtgatgagacaaactgaaaattattgcaagcattgactataattatgcagtacgttctcaggatgcatccaggggttcattttcatgagcctgtccaggttagtttactcctgaccactaatagcattgtcatttgggctttctgttgaatgaatcaacaaaccacaatacttcctgggaccttttgtactttatttgaactatgagtctttaatttttcctgatgatggtggctgtaatatgttgagttcagtttactaaaggttttactattatggtttgaagggagtctcatgacctctcagaaaaggtgcacctccctgaaattgcatatatgtatatagacatgcacacgtgtgcatttgtttgtatacatatatttgtccttcgtatagcaagttttttgctcatcagcagagagcaacagatgttttattgagtgaagccttaaaaagcacacaccacacacagctaactgccaaaatacattgaccgtagtagctgttcaactcctagtacttagaaatacacgtatggttaatgttcagtccaacaaaccacacacagtaaatgtttattaatagtcatggttcgtattttaggtgactgaaattgcaacagtgatcataatgaggtttgttaaaatgatagctatattcaaaatgtctatatgtttatttggacttttgaggttaaagacagtcatataaacgtcctgtttctgttttaatgttatcatagaattttttaatgaaactaaattcaattgaaataaatgatagttttcatctccaaaaaaaaaaaaaaagggcggcccgctcgagtctagagggcccggtttaaacccgctgatcagcctcgactgtgccttctagttgccagccatctgttgtttggccctcccccgtgccttccttgaccctggaaggggccactccc

SEQ ID NO: 537 - protein, 1228 aa, Homo sapiens
MLPVYQEVKPNPLQDANLCSRVFFWWLNPLFKIGHKRRLEEDDMYSVLPEDRSQHLGEELQGFWDKEVLRAENDAQKPSLTRAIIKCYWKSYLVLGIFTLIEESAKVIQPIFLGKIINYFENYDPMDSVALNTAYAYATVLTFCTLILAILHHLYFYHVQCAGMRLRVAMCHMIYRKALRLSNMAMGKTTTGQIVNLLSNDVNKFDQVTVFLHFLWAGPLQAIAVTALLWMEIGISCLAGMAVLIILLPLQSCFGKLFSSLRSKTATFTDARIRTMNEVITGIRIIKMYAWEKSFSNLITNLRKKEISKILRSSCLRGMNLASFFSASKIIVFVTFTTYVLLGSVITASRVFVAVTLYGAVRLTVTLFFPSAIERVSEAIVSIRRIQTFLLLDEISQRNRQLPSDGKKMVHVQDFTAFWDKASETPTLQGLSFTVRPGELLAVVGPVGAGKSSLLSAVLGELAPSHGLVSVHGRIAYVSQQPWVFSGTLRSNILFGKKYEKERYEKVIKACALKKDLQLLEDGDLTVIGDRGTTLSGGQKARVNLARAVYQDADIYLLDDPLSAVDAEVSRHLFELCICQILHEKITILVTHQLQYLKAASQILILKDGKMVQKGTYTEFLKSGIDFGSLLKKDNEESEQPPVPGTPTLRNRTFSESSVWSQQSSRPSLKDGALESQDTENVPVTLSEENRSEGKVGFQAYKNYFRAGAHWIVFIFLILLNTAAQVAYVLQDWWLSYWANKQSMLNVTVNGGGNVTEKLDLNWYLGIYSGLTVATVLFGIARSLLVFYVLVNSSQTLHNKMFESILKAPVLFFDRNPIGRILNRFSKDIGHLDDLLPLTFLDFIQTLLQVVGVVSVAVAVIPWIAIPLVPLGIIFIFLRRYFLETSRDVKRLESTTRSPVFSHLSSSLQGLWTIRAYKAEERCQELFDAHQDLHSEAWFLFLTTSRWFAVRLDAICAMFVIIVAFGSLILAKTLDAGQVGLALSYALTLMGMFQWCVRQSAEVENMMISVERVIEYTDLEKEAPWEYQKRPPPAWPHEGVIIFDNVNFMYSPGGPLVLKHLTALIKSQEKVGIVGRTGAGKSSLISALFRLSEPEGKIWIDKILTTEIGLHDLRKKMSIIPQEPVLFTGTMRKNLDPFNEHTDEELWNALQEVQLKETIEDLPGKMDTELAESGSNFSVGQRQLVCLARAILRKNQILIIDEATANVDPRTDELIQKKSGRNLPTAPC

SEQ ID NO: 538 - protein, 1261 aa, Homo sapiens
MYSVLPEDRSQHLGEELQGFWDKEVLRAENDAQKPSLTRAIIKCYWKSYLVLGIFTLIEESAKVIQPIFLGKIINYFENYDPMDSVALNTAYAYATVLTFCTLILAILHHLYFYHVQCAGMRLRVAMCHMIYRKALRLSNMAMGKTTTGQIVNLLSNDVNKFDQVTVFLHFLWAGPLQAIAVTALLWMEIGISCLAGMAVLIILLPLQSCFGKLFSSLRSKTATFTDARIRTMNEVITGIRIIKMYAWEKSFSNLITNLRKKEISKILRSSCLRGMNLASFFSASKIIVFVTFTTYVLLGSVITASRVFVAVTLYGAVRLTVTLFFPSAIERVSEAIVSIRRIQTFLLLDEISQRNRQLPSDGKKMVHVQDFTAFWDKASETPTLQGLSFTVRPGELLAVVGPVGAGKSSLLSAVLGELAPSHGLVSVHGRIAYVSQQPWVFSGTLRSNILFGKKYEKERYEKVIKACALKKDLQLLEDGDLTVIGDRGTTLSGGQKARVNLARAVYQDADIYLLDDPLSAVDAEVSRHLFELCICQILHEKITILVTHQLQYLKAASQILILKDGKMVQKGTYTEFLKSGIDFGSLLKKDNEESEQPPVPGTPTLRNRTFSESSVWSQQSSRPSLKDGALESQDTENVPVTLSEENRSEGKVGFQAYKNYFRAGAHWIVFIFLILLNTAAQVAYVLQDWWLSYWANKQSMLNVTVNGGGNVTEKLDLNWYLGIYSGLTVATVLFGIARSLLVFYVLVNSSQTLHNKMFESILKAPVLFFDRNPIGRILNRFSKDIGHLDDLLPLTFLDFIQTLLQVVGVVSVAVAVIPWIAIPLVPLGIIFIFLRRYFLETSRDVKRLESTTRSPVFSHLSSSLQGLWTIRAYKAEERCQELFDAHQDLHSEAWFLFLTTSRWFAVRLDAICAMFVIIVAFGSLILAKTLDAGQVGLALSYALTLMGMFQWCVRQSAEVENMMISVERVIEYTDLEKEAPWEYQKRPPPAWPHEGVIIFDNVNFMYSPGGPLVLKHLTALIKSQEKVGIVGRTGAGKSSLISALFRLSEPEGKIWIDKILTTEIGLHDLRKKMSIIPQEPVLFTGTMRKNLDPFNEHTDEELWNALQEVQLKETIEDLPGKMDTELAESGSNFSVGQRQLVCLARAILRKNQILIIDEATANVDPRTDELIQKKIREKFAHCTVLTIAHRLNTIIDSDKIMVLDSGRLKEYDEPYVLLQNKESLFYKMVQQLGKAEAAALTETAKQRWGFTMLARLVSNS

SEQ ID NO: 539 - protein, 10 aa, Artificial Sequence
  Made in a lab
CLSHSVAVVT

SEQ ID NO: 540 - protein, 9 aa, Artificial Sequence
  Made in a lab
AVVTASAAL

SEQ ID NO: 541 - protein, 14 aa, Homo sapiens
LAGLLCPDPRPLEL

SEQ ID NO: 542 - protein, 15 aa, Homo sapiens
TQVVFDKSDLAKYSA

SEQ ID NO: 543 - protein, 12 aa, Homo sapiens
FMGSIVQLSQSV

SEQ ID NO: 544 - protein, 18 aa, Homo sapiens
TYVPPLLLEVGVEEKFMT

SEQ ID NO: 545 - protein, 18 aa, Homo sapiens
MDRLVQRFGTRAVYLASV

SEQ ID NO: 546 - protein, 29 aa, Homo sapiens
FVGEGLYQGVPRAEPGTEARRHYDEGVRM

SEQ ID NO: 547 - protein, 58 aa, Homo sapiens
VAEEAALGPTEPAEGLSAPSLSPHCCPCRARLAFRNLGALLPRLHQLCCRMPRTLRRL

SEQ ID NO: 548 - protein, 18 aa, Homo sapiens
IDWDTSALAPYLGTQEEC

SEQ ID NO: 549 - protein, 18 aa, Homo sapiens
LEALLSDLFRDPDHCRQA

SEQ ID NO: 550 - protein, 14 aa, Homo sapiens
SDHWRGRYGRRRPF

SEQ ID NO: 551 - protein, 11 aa, Artificial Sequence
  Made in a lab
FDKSDLAKYSA

SEQ ID NO: 552 - DNA, 2577 bp, Homo sapiens
agcatatgtaacatgacctgtgcttcagtgttcttttgtgatcaaaaattccttacttttagttttttatctatggtagaaccacccagagcaggggtcctcaactcccaggccacagactcataccagtccacggactattatgaaccacaccacacaggaggaggtgagcactaggcaagccaaggaagcttcacctgtacttacagccacacgccatggctcatattacagcctgaactctgcctccactcagatcagtgataacattagaaactcattggagcacgaaccctgttgtgaactgcctatccgaaggatctaggttgtgtgcttcgtatgagaatctaatgccagatgatctatcattgtctcactttgcccccagataagaccatctagttgcagaaaaataagctcagagcttccactgattctacattatggatatgtgccgccgaagcaagcacaaagccctacttttacacatgcctagtgatgcttcatggacaaggcttggctctgttgagtccaactaacctacctgagattctgagatttctcttcaatggcttcctgtgagctagagtttgaaaatatcttaaaatcttgagctagagatggaagtagcttggacgattttcattatcatgtaaatcgggtcactcaaggggccaaccacagctgggagccactgctcaggggaaggttcatatgggactttctactgcccaaggttctatacaggatataaaggtgcctcacagtatagatctggtagcaaagaagaagaaacaaacactgatctctttctgccacccctctgaccctttggaactcctctgaccctttagaacaagcctacctaatatctgctagagaaaagaccaacaacggcctcaaaggatctcttaccatgaaggtctcagctaattcttggctaagatgtgggttccacattaggttctgaatatggggggaagggtcaatttgctcattttgtgtgtggataaagtcaggatgcccaggggccagagcagggggctgctgctttgggaacaatggctgagcatataaccataggtatgggaacaaaaaacatcaaagtcactgtatcaattgccatgaagactcgagggacctgaatctaccgattcatcttaaggcagcaggaccagtttgagtggcaacaatgcagcagcagaatcaatggaaacaacagaatgattgcaatgtccttttttttctcctccttctgacttgataaaagggaccgtcttccttggatttagtgaacccctttggttcctgaaaaattcaaggagtatctaggacatagtccccagaagacagtacaagactttctgataaactggacatttcaagrcccaaataactaatcagaaaaatcaaagatgtgatactattttttatcccatgcataggtgctacacttggatcaaatgaacaatgttgggatctytatggataaaggtcttaaaagtcctgagataaagaatcctgcacccactggtacttctaacttgtcttgttttttgtctgwtttctggctgatgcaggggactaactcactgccacgcgaaaactacctgaactgaactatgacatctcacctgatatgtaagatgtaactgttataattattttaaacctcaatttagcattaactagccttttaatgtaaacacttacacattatgaygactagaaacagcatactctctggccgtctgtccagatagatcttgagaagatacatcaatgttttgctcaagtagaaggctgactatacttgccgatccacaacatacagcaagtatgagagcagttctaaaatgacagagataggaacagtaataaagttattktaaaagctaatttgatatactttaccaatttaacatcttgcctgtccgtgcagaatcaaacatttacatgcactaaaagacataagcatcttcagtgctcaagtgttcatctttgtaaaataccaccaaggttaaaaggaagggacaaaaaaaaaaaaccctcttatctcagtggggtattgcatagcagaagctactaatttgaagtcctttgatggacaagaaacaatattagggccacttatctgaaatgaacaaagatttaagtgaagatttcatcacagcttccctagactgatatgctgtaatagaaaatcagctagggggtaaaataaataagagctctctgcatgctgaaagcaagtaagattaataataatggtaagaatagtagtcacaggagtttcagttaatgatgccaataagcatgtgctaggcactgaattaaatgccacatatatctttcttatgcgcagcaaactttgaaggatatattctcctacttttcatatatgacaacatatttggtggtaaataacgttcccaaggtcacacacctagcaagtaagaaagttaggaattaaacccagtattgtgtgaatctaaagcctaacttttttctctttatcacccacctacggcttgtcttcattaaaggaaaagtgtatccacttaaaaaaaaaaaaaa

SEQ ID NO: 553 - protein, 58 aa, Homo sapiens
SICNMTCASVFFCDQKFLTFSFLSMVEPPRAGVLNSQATDSYQSTDYYEPHHTGGGEH

SEQ ID NO: 554 - protein, 59 aa, Homo sapiens
LQKNKLRASTDSTLWICAAEASTKPYFYTCLVMLHGQGLALLSPTNLPEILRFLFNGFL

SEQ ID NO: 555 - protein, 71 aa, Homo sapiens
LGRFSLSCKSGHSRGQPQLGATAQGKVHMGLSTAQGSIQDIKVPHSIDLVAKKKKQTLISFCHPSDPLELL

SEQ ID NO: 556 - protein, 81 aa, Homo sapiens
NHPEQGSSTPRPQTHTSPRTIMNHTTQEEVSTRQAKEASPVLTATRHGSYYSLNSASTQISDNIRNSLEHEPCCELPIRRI

SEQ ID NO: 557 - protein, 54 aa, Homo sapiens
SLSATPLTLWNSSDPLEQAYLISAREKTNNGLKGSLTMKVSANSWLRCGFHIRF

SEQ ID NO: 558 - protein, 77 aa, Homo sapiens
  VARIANT (1)...(77): Xaa = Any amino acid
NDRDRNSNKVIXKANLIYFTNLTSCLSVQNQTFTCTKRHKHLQCSSVHLCKIPPRLKGRDKKKKPSYLSGVLHSRSY

SEQ ID NO: 559 - protein, 50 aa, Homo sapiens
TLPPLRSVITLETHWSTNPVVNCLSEGSRLCASYENLMPDDLSLSHFAPR

SEQ ID NO: 560 - protein, 56 aa, Homo sapiens
IGSLKGPTTAGSHCSGEGSYGTFYCPRFYTGYKGASQYRSGSKEEETNTDLFLPPL

SEQ ID NO: 561 - protein, 57 aa, Homo sapiens
  VARIANT (1)...(57): Xaa = Any amino acid
VLHLDQMNNVGIXMDKGLKSPEIKNPAPTGTSNLSCFLSXFWLMQGTNSLPRENYLN

SEQ ID NO: 562 - protein, 59 aa, Homo sapiens
  VARIANT (1)...(59): Xaa = Any amino acid
DLYPXRSQHCSFDPSVAPMHGIKNSITSLIFLISYLXLEMSSLSESLVLSSGDYVLDTP

SEQ ID NO: 563 - protein, 79 aa, Homo sapiens
CFLFPYLWLYAQPLFPKQQPPALAPGHPDFIHTQNEQIDPSPHIQNLMWNPHLSQELAETFMVRDPLRPLLVFSLADIR

SEQ ID NO: 564 - protein, 64 aa, Homo sapiens
ACSKGSEEFQRVRGVAERDQCLFLLLCYQIYTVRHLYILYRTLGSRKSHMNLPLSSGSQLWLAP

SEQ ID NO: 565 - protein, 57 aa, Homo sapiens
  VARIANT (1)...(57): Xaa = Any amino acid
LYYCSYLCHFRTALILAVCCGSASIVSLLLEQNIDVSSQDLSGQTAREYAVSSXHNV

SEQ ID NO: 566 - protein, 55 aa, Homo sapiens
ILLEFFRNQRGSLNPRKTVPFIKSEGGEKKGHCNHSVVSIDSAAALLPLKLVLLP

SEQ ID NO: 567 - protein, 51 aa, Homo sapiens
YSDFDVFCSHTYGYMLSHCSQSSSPLLWPLGILTLSTHKMSKLTLPPIFRT

SEQ ID NO: 568 - protein, 75 aa, Homo sapiens
KVGEYILQSLLRIRKIYVAFNSVPSTCLLASLTETPVTTILTIIINLTCFQHAESSYLFYPLADFLLQHISLGKL

SEQ ID NO: 569 - DNA, 4809 bp, Homo sapiens
gcatccagagtggtggactggttacaggctatgaacctacactgatgcggcaccaccacccagagtccacrggttatgttggttcacatttactcttgctgtggtatggtctataggtttggacagatgtccgataatcctttttacattttggcatccttgggtagctcgtcttgtaggaatggacttgcttcaaagtggaggcaggcagatccttcagacgggtatatggagccctgttttcagttgcttttctaattctctcttatcgtttacctcaaaatcttcctgaggtctcgcttccttttaaaatccttgtctactttgcagcatcactctgacactcccattgattcctcagcacctactgactacacggttaggagtgcaagggtagaattcatgttttattcatctttgggtctgtagcacccagcaaagtgctcagtaaatgcgcagtaattgatttgacctctgaacaaatacacactgtactaagaatctacacaccgaaagacaaaaacaagacaaatttgagtgctacaggtgtcacgcttggcatcacacatgtgcctgtgtattcctctaggtggttaccaggagctctgccactgcatgtccactagtgacgggttcgctccaccaccccagctgggtagccgctgctctcacataaggggtccaattaaaattgccaggaataaattcccccggactttgacttctcaagagctaagaaggtttgctgagtattctggcatgatgtttggtgatcaaacaactgctggccaaaaatgatgagtatttccccctcttgctgaagatgtgctccatacaatagtccatcacattcatcattcatcagtctggaagtgtgcagaacaacatgtaatagataatatgattggctgcacacttccagactgatgaatgatgaatgtgatggactattgtatggagcacatcttcagcaagagggggaaatactcatcattttatctattacatgttgttctggtttttttttttttccaatgtccagcctaaactataaagtactttgagaacgcacagtgagccataagcttgccaataaagagtcctctgtggtatggaactggcttatttcatacacaatctgcaaacaatgagggcactattggaaacatactgtgctgcacagagcatttacaccgcttatctttaatcttccccagcaatccttgctttgtgcgcatttatgatccttgctctcagaagtccacatacttttccccaaccgtaacaaattatttaactcatctaatgtatgtatgtccgcgcagtctgaaaacagtaattgtccttgggaagaagtgagtttaagagagctctagggcactcatcacaactccagccctgccctccatgtggtagcagctctttggactggggctaagtgcttattcttgtgcttcattcctggtaagctcaatttctttaccttaggataactttgctggaaaagggctcagattcagccgaccattgtggcctctgtggctgtcacagcttgtccctgacatgctatgatgttgggtccccttctcatccccttgggatttcttctgctggcccacagccagaacaactaggccttttactccaccatccctttgttttcttttgtttcgttggtaaaaatcaatccttctaccatccatgcatagcaatttctaaaaactgaatttcaagagcagtatctgaagaaacaaacatgatttggtccttttagtaaacagaataaattttaataaatcaactttgaaatagttgtaagagttaagaaaaagcacaaaactgagatcatcagagcagcttggcctcaaaggacaggcagcaggattctacagggtttgagccttcctaagtgaagctgtttcctgcaggctccctgctccaagctcctagctaacagccccttctcccacgattggcaacaaagagcaaaaataactttgtacttgatgctgagtcagtgtaaaaagccataaaaaattccctctaaatgtcaaaatgtttgcctcctttgaggcttctctcctcctactgggtctggataaattagcactgggcttatattgagtcacagatctgggccctgccacagagagcttcctcctagtgtgtgatgctttttctccaaactattgatacaaaatgcactggaatagaaatcaacagaaactggtcaaaggtgtggcatacacattctcatgtagatgtaaagctgtgcttagaattcctttgtggagtctggtttggtcttggttttcttggtgtttgattcatttttttacgtaaattacaaaaaccctccacatttcttcatggattgtattagtccatgttctccagagaagcagaacgagttggatgtatgttttggaagagattatgaggaaccggctcatgtgatgaaggaggttgagaggtcctgtgctctgccatctgcaagctgaagacctggaaagctgagggtgtggctccagtctgagtctgaaggcccaagaaccaggggaaccaacggtgtagattccaggttgaaggcaggagaagatggatgtcccagctcagcaggcaggcaggaagcaaatggggtaaattcctccttcctccaccttttgttccattcaggccttcaacagattggatgagcgcccccccacccccacactagggagggccatctgctttactgagtcggctgagtcaagtgccagcctcatcccaaaacactctccagacacacgcagaaatgtttcatctgggcaccctgtggccagtcatgctgacacacagaactaaccatgacatggattcttcttaaagcagtgataggagcgaacagaaacattttcataattttcaattatttttaatgaaaactatatctgatggaattgtttaaacctagtctggccacacattatttcctgggaccgcccctccttcaatcccttggacactgatgactttatgcccagattacactggaggcctgtgctgattttctaacacatacctgcaactgagctggcaaaaagaaaactaggcaagtatgacagatacatgatgcacaggctaagtgcaaaggaaagaaaaacaccaactgcagggatgagggactcacccctttagaagtttctacttgagcagctagaagactacaatgccactcatcaaaacagtgactcagggggagtatttgggataaaggaggaatctgatgttggaggtcaaatttgaagtgtctttaagacctacaggtaacgagacagctggacaaacacatggaactcaggacaaaggctctaaggacagcacagcagctgacatcctgtgtgacagccttgaaagcagcaggcccgccgctcacattttggaagggaaaatgggtacaatgttgtctgccactttggggccttcttgggtcacatgcattttacatttatgcagttgatatatttatgtttcctgggtcttttatacattagacaccatgattctcaatcctttgttattttgtattacaaaaagctgaattattatttcaaatatgggcaaattagagccttccatattgccaaggtgtatcaaccacactgataycaygatctctcttttgaattagttttccagttcacacctaccatttatttcatgattggtttcagacttgttcctcctggaaacactccctaacaagcacccttgcaggaatgaagacacaccacacacatctaccccattactgcatgtactcaagagtcagcttttatatgatctctcccaagtgctcctataatggggatctttcactcaccctaaagtgaggacaaaatacttgaaagcatgagcccagtgcctgtaggtgtgcaattaacctcagaccaaggaagtgccgaacgcatctggcttttagcaaggcacctgacaaagtccttcaggatgtttttgtacatgagctagagaaatgtacctggagaacagcttctactgccagatgatcttactcaaaagatgcagattaagcaaaatatcaacccaaagggtggtccctgatggcccaccagcccctgtgcctggctcgtttcctatgtttcctagatttggtttcagacttgctcctcctgcagacactccctaaccagcatccttgcagaaaactggtgaactagaaaaggcctgtgtgggtcacgtggccacccaacaccacagcagtgtctaaggtatgcgtgggagcctgcacagcaggagcggggtcttctggagacccgcatgagatgcaaagggcagtggacaaggagccaagggaggtggctctagtcacgctggtatggtgccagcttgaggatgctgggcaagtcccgagccgtctgccttcctagtaccacagttaccactgtctgttacctcgcgagttcaagtgcttcacgtgagacagctacgagacaggcccctggaaactggaaaatgcyaagtaaatgtcatgcacaattgttgttcacattttatctcaatcacttttaccaaatcaggctaaaccctgggtattcataacgtcttgggctgtacaaattgttccttgaaatgactcagagacattttctgaattggcttccatcagccaagcatttcttcagaactggaaaaatgctttaaatttggctttgtcatgattattaaaacactctgtacattttttattattgaaattaacacattgcctactttttaaaaattggaaaaagaaaaaaaaaaaaaaaa

SEQ ID NO: 570 - DNA, 951 bp, Homo sapiens
aaaattgaatattgagataccattctttagtgttaccttttttacccacatgtgtttctgaaaatattggaattttattcatcttaaaaattggacccggccttatttaccatctttaatccattttagtactatgggtgagtacatggaattgaagtctggcttaaatcttcagaaagttatatatctattttattttatttttttgagacagagtctcgctgtgtcacccaggctggagtgcggtgccacaatcttggctcactgcaacctctgagtcccaggttcaagcgatactcatgcctcggcctcctgagtagctgggactacaggcgtgcaccaccacatctggctaatctttttttgtatttttagtagagacggggtttcactgtggtctccatctcctgacctcgtgatccgcctgcctcccaaagtgctgggattacaggcatgagccaccgcacacagctgggactgggtaatttataaagaaaagaggtttaatgactcacagttccgcatggctggagaggcctcaggaaacttacaatcatggtggaaggcgaaggggaagcaaggcacgtcttacatggtggcaggagagaacgagtgaggggggagactgccacaaactttttttttttgagacaagagtctggccctgttgcccaggctggagtgcagtggcatgatctcagctcactgcaacctctgcctcacaggttcaagcaattctcatgcctcagcctcccgcatagctgggaccacaggtatgcaccaccacacctagctaatttttgtagttttagtagagatggggtctcactatgttgctcaggctggtctaaaactcctgggctccagcaatccgcctgccttggcctcccaaagtgctggggttacaggcataagccaccacatccagcctgccacatacttttaaactat

SEQ ID NO: 571 - DNA, 819 bp, Homo sapiens
cagcttaaaaatggtttcttgaaatcagtgattagcattcactcaccagtacccctactaaggggtaggcactggtttgtactcctgggaatacaggagtacaccagaatttatttctgcttattgcttttgttgcaaatgccgtggcttcatctgaggaattctagaattcagagggtgtagccctccactctgctgtcttgctatctgctctcattgcatccgtttaacctgcattctgaaagatgtttctcaggtttttccttgacgattttcttcttttctgattctgacaatgttttaaatcattgtactgtggttatcatttctctgcatttattttacccatcttcctttgtaacttgtcctattgtcttttaatttctgcctgttctttatggctttcaacttcataaataacatgttttctcaaatctctttgtgaattccagagagggccaggcacggtggctcacatctgtaatcccagcactttggggaggctgagacgggtggatcacttgaggtcaggagtttgagaccagcctggccaacatggtgaaatcccgtttcactaaaaatacaaaaattacccaggcatggtggcgggcgcctgtaatcccaggtactcgggaggctgagggaggagaatcgcttgaacctgggaggctgagggaggagaatcgcttgaacccgggaggcagaggttgcagtgaaccgagatcatgttgctgcactccagcctggtcaacagagcaagactctgcctcaaaaacaaacaaataaacaaacaaacaaacaaaacagagagattttgct

SEQ ID NO: 572 - DNA, 203 bp, Homo sapiens
tatagaatactcaagctatgcatcaagcttggtaccgagctcggatccactatttacggccgccagtgtgctggaattcgcccttagctcggatccactagtccagtgtggtggaattccattgtgttgggcccaacacaatggagccaccacatccagcctgccacatacttttaaactatcaggtctcatgagaactcatg

SEQ ID NO: 573 - protein, 132 aa, Homo sapiens
MVEGEGEARHVLHGGRRERVRGETATNFFFLRQESGPVAQAGVQWHDLSSLQPLPHRFKQFSCLSLPHSWDHRYAPPHLANFCSFSRDGVSLCCSGWSKTPGLQQSACLGLPKCWGYRHKPPHPACHILLNY

SEQ ID NO: 574 - protein, 62 aa, Homo sapiens
MTHSSAWLERPQETYNHGGRRRGSKARLTWWQERTSEGGDCHKLFFFETRVWPCCPGWSAVA

SEQ ID NO: 575 - protein, 76 aa, Homo sapiens
MVKSRFTKNTKITQAWWRAPVIPGTREAEGGESLEPGRLREENRLNPGGRGCSEPRSCCCTPAWSTEQDSASKTNK

SEQ ID NO: 576 - protein, 68 aa, Homo sapiens
  VARIANT (1)...(68): Xaa = Any Amino Acid
MLGKSRAVCLPSTTVTTVCYLASSSASRETATRQAPGNWKMXSKCHAQLLFTFYLNHFYQIRLNPGYS

SEQ ID NO: 577 - protein, 57 aa, Homo sapiens
MYLENSFYCQMILLKRCRLSKISTQRVVPDGPPAPVPGSFPMFPRFGFRLAPPADTP

SEQ ID NO: 578 - protein, 51 aa, Homo sapiens
MQLIYLCFLGLLYIRHHDSQSFVILYYKKLNYYFKYGQIRAFHIAKVYQPH

SEQ ID NO: 579 - protein, 56 aa, Homo sapiens
MHFTFMQLIYLCFLGLLYIRHHDSQSFVILYYKKLNYYFKYGQIRAFHIAKVYQPH

SEQ ID NO: 580 - protein, 67 aa, Homo sapiens
MELRTKALRTAQQLTSCVTALKAAGPPLTFWKGKWVQCCLPLWGLLGSHAFYIYAVDIFMFPGSFIH

SEQ ID NO: 581 - protein, 77 aa, Homo sapiens [sequence omitted]

SEQ ID NO: 582 - protein, 51 aa, Homo sapiens
MLFLQTIDTKCTGIEINRNWSKVWHTHSHVDVKLCLEFLCGVWFGLGFLGV

SEQ ID NO: 583 - protein, 60 aa, Homo sapiens [sequence omitted]

SEQ ID NO: 584 - protein, 76 aa, Homo sapiens
MCLCIPLGGYQELCHCMSTSDGFAPPPQLGSRCSHIRGPIKIARNKFPRTLTSQELRRFAEYSGMMFGDQTTAGQK

SEQ ID NO: 585 - protein, 50 aa, Homo sapiens
MVYRFGQMSDNPFYILASLGSSSCRNGLASKWRQADPSDGYMEPCFQLLF

SEQ ID NO: 586 - protein, 60 aa, Homo sapiens
MLVHIYSCCGMVYRFGQMSDNPFYILASLGSSSCRNGLASKWRQADPSDGYMEPCFQLLF

SEQ ID NO: 587 - DNA, 1408 bp, Homo sapiens
ctggacactttgcgagggcttttgctggctgctgctgctgcccgtcatgctactcatcgtagcccgcccggtgaagctcgctgctttccctacctccttaagtgactgccaaacgcccaccggctggaattgctctggttatgatgacagagaaaatgatctcttcctctgtgacaccaacacctgtaaatttgatggggaatgtttaagaattggagacactgtgacttgcgtctgtcagttcaagtgcaacaatgactatgtgcctgtgtgtggctccaatggggagagctaccagaatgagtgttacctgcgacaggctgcatgcaaacagcagagtgagatacttgtggtgtcagaaggatcatgtgccacagatgcaggatcaggatctggagatggagtccatgaaggctctggagaaactagtcaaaaggagacatccacctgtgatatttgccagtttggtgcagaatgtgacgaagatgccgaggatgtctggtgtgtgtgtaatattgactgttctcaaaccaacttcaatcccctctgcgcttctgatgggaaatcttatgataatgcatgccaaatcaaagaagcatcgtgtcagaaacaggagaaaattgaagtcatgtctttgggtcgatgtcaagataacacaactacaactactaagtctgaagatgggcattatgcaagaacagattatgcagagaatgctaacaaattagaagaaagtgccagagaacaccacataccttgtccggaacattacaatggcttctgcatgcatgggaagtgtgagcattctatcaatatgcaggagccatcttgcaggtgtgatgctggttatactggacaacactgtgaaaaaaaggactacagtgttctatacgttgttcccggtcctgtacgatttcagtatgtcttaatcgcagctgtgattggaacaattcagattgctgtcatctgtgtggtggtcctctgcatcacaaggaaatgccccagaagcaacagaattcacagacagaagcaaaatacagggcactacagttcagacaatacaacaagagcgtccacgaggttaatctaaagggagcatgtttcacagtggctggactaccgagagcttggactacacaatacagtattatagacaaaagaataagacaagagatctacacatgttgccttgcatttgtggtaatctacaccaatgaaaacatgtactacagctatatttgattatgtatggatatatttgaaatagtatacattgtcttgatgttttttctgtaatgtaaataaactatttatatcacacaatawagttttttctttcccatgtatttgttatatataataaatactcagtgatgagaaaaaaaaaaaaaaaaaaaaaarwmgaccc

SEQ ID NO: 588 - protein, 81 aa, Homo sapiens [sequence omitted]

SEQ ID NO: 589 - protein, 157 aa, Homo sapiens
MTMCLCVAPMGRATRMSVTCDRLHANSRVRYLWCQKDHVPQMQDQDLEMESMKALEKLVKRRHPPVIFASLVQNVTKMPRMSGVCVILTVLKPTSIPSALLMGNLMIMHAKSKKHRVRNRRKLKSCLWVDVKITQLQLLSLKMGIMQEQIMQRMLTN

SEQ ID NO: 590 - protein, 347 aa, Homo sapiens
MLLIVARPVKLAAFPTSLSDCQTPTGWNCSGYDDRENDLFLCDTNTCKFDGECLRIGDTVTCVCQFKCNNDYVPVCGSNGESYQNECYLRQAACKQQSEILVVSEGSCATDAGSGSGDGVHEGSGETSQKETSTCDICQFGAECDEDAEDVWCVCNIDCSQTNFNPLCASDGKSYDNACQIKEASCQKQEKIEVMSLGRCQDNTTTTTKSEDGHYARTDYAENANKLEESAREHHIPCPEHYNGFCMHGKCEHSINMQEPSCRCDAGYTGQHCEKKDYSVLYVVPGPVRFQYVLIAAVIGTIQIAVICVVVLCITRKCPRSNRIHRQKQNTGHYSSDNTTRASTRLI

SEQ ID NO: 591 - DNA, 565 bp, Homo sapien
actaaagcaaatgaacaagctgacttgctagtatcatctgcattcattgaagcacaagaacttcatgccttgactcatgtaaatgcaataggattaaaaaataaatttgatatcacatggaaacagacaaaaaatattgtacaacattgcacccagtgtcagattctacacctggccactcaggaagcaagagttaatcccagaggtctatgtcctaatgtgttatggcaaatggatgtcatgcacgtaccttcatttggaaaattgtcatttgtccatgtgacagttgatacttattcacatttcatatgggcaacctgccagacaggagaaagtacttcccatgttaaaagacatttattatcttgttttcctgtcatgggagttccagaaaaagttaaaacagacaatgggccaggttactgtagtaaagcatttcaaaaattcttaaatcagtggaaaattacacatacaataggaattctctataattcccaaggacaggccataattgaaggaactaatagaacactcaaagctcaattggttaaacaaaaaaaaaaaa

SEQ ID NO: 592 - protein, 188 aa, Homo sapien
TKANEQADLLVSSAFIEAQELHALTHVNAIGLKNKFDITWKQTKNIVQHCTQCQILHLATQEARVNPRGLCPNVLWQMDVMHVPSFGKLSFVHVTVDTYSHFIWATCQTGESTSHVKRHLLSCFPVMGVPEKVKTDNGPGYCSKAFQKFLNQWKITHTIGILYNSQGQAIIEGTNRTLKAQLVKQKKK

SEQ ID NO: 593 - DNA, 271 bp, Homo sapien
  misc_feature (1)...(271): n = A,T,C or G
actttatgttcnagtgcanaaanccncctggattgccaccntactctcagggctgtganttgtgcncccanagcaacctgggcacgcggggacaggggggccnacaattgagggagcggtgtccctagctggggtctatacatgncngggnaagggcngctgagtnccatnagcaaagganctagnatntgcgggggtgcggcctgggcctaccctttnaagcatccntngatccactccangaanccnggggtagncaggtttnccaaca

SEQ ID NO: 594 - DNA, 376 bp, Homo sapien
  misc_feature (1)...(376): n = A,T,C or G
cctttgggggnggggggaacctttaccattgtncccctttatttcatttggttngggttcgcgccctcnngggccaacaaagttatcgtnnttgaagagaanatttttttggnttngncccgattaagcgncaaatgtgtagcaaaangccgtgccacttgtggcgtagctncgtcgggtcgattcgacgacaaggcgtngcgcgntancgttagtctcnaatngacccngtggcatgagcccacganggnttcgtgtcgtcacatggnctctagacataacgcncnccnttttttncagagggggntgccgcccttagggaggnaggggtggggacactagccaanccanantctnaccccattgaagaaaaggn

SEQ ID NO: 595 - DNA, 242 bp, Homo sapien
  misc_feature (1)...(242): n = A,T,C or G
agnctgctgntcgtnccctntatgtggcttcatnntgaggacaanagtngcactgaggcttgngnatgccaggcaaggncaagctggctcaaaaagcatccacccacctctgnaangggtatgccangagcangtgcaccagtcccaactangagncccnggcatgntacatcttcttccacccctnaaantttgngctacaangnccatttttctttttctcttaagggncncntggcttc

SEQ ID NO: 596 - DNA, 535 bp, Homo sapien
  misc_feature (1)...(535): n = A,T,C or G
accagttggatactgctaaanagatatttatgcagcctcatatgttaagtcgtatattttgaaagctttttaaattttttctttaagaagattttagatgcttatcactgagtaccagagggatgtaggctgatgcccttatcaacaaagtcagggactgtggcacacaaggattgactactgcagacacggccacaatgctacctctagagggcctgaatccccctgccctctctggtggggagaagggctggcagagccattagcatgggctccggccaatcctggccactttgacactcctggtgctgacccagggtcctggaggaagggatgaggtgggcagtagagatgctcagggcagtggcccctttccatccacactggaactatttcagtattttaccaccaattcagccattcccttgtgcgctggctgaacatcagccctgctccaggtctcagtttcccctttgtaaagggaaagctctggattcagggagtgatgaagaggtcatcatggtcttgagaattc

SEQ ID NO: 597 - DNA, 257 bp, Homo sapien
  misc_feature (1)...(257): n = A,T,C or G
tttcnatacccaaaantaccccatattangaccanacatttgtctnggaaaaattaccattntntaacntttgggccacctgagannaaatgggtgtaatncatgataagatggancagnattnctcttaagatnngatnagaccccgtttttcacggaacatatccaagnacccaataggnaacaagccacgggnggagtcacaaacatatattctttactctcataatccgtnncacanaactnttgnacttgac

SEQ ID NO: 598 - DNA, 222 bp, Homo sapien
  misc_feature (1)...(222): n = A,T,C or G
nntggntaccgtcnaaacttnncttggtacccgagctcggatccactagtccagtgtggtggaattccattgtgttgggctataagctgtaatagtggagncgtgctnggttcattgcannagnccctccgcanncacncttgnnacaacctgtgagnaggcnataaattattcacataatcatcactgcatgaanctgactcaaacgcatccacntacacc

SEQ ID NO: 599 - DNA, 238 bp, Homo sapien
  misc_feature (1)...(238): n = A,T,C or G
gcatgacatcancgatgtntttggnnacctganattngctaaaactngngnatgccgggnatgnaggtttggtantgatctatgcactcacatctcatggggacgtttcatgtggagtgntcgacaangttgctgnancngagaagtgatgatctcagttgaaagggtcatgtgaatacacnttacacttgaaaaagaagcacattgggaatatcacgaaacgnccaccaacatcctg

SEQ ID NO: 600 - DNA, 232 bp, Homo sapien
  misc_feature (1)...(232): n = A,T,C or G
cgaactatttagactacctaggaaaattattttagtatcagaagaatatcaggggtgtagtactcatcagagctaaatgagagcgctttaaaaatgttagtttgtcttccgccatttctacagaaagctgcaatttcaggttttcaacctaataggtgatatttaanaaaaaaaaaaagcaatcgcaaatagccccactgcttttacaaatcattttttccccaacacaatg

SEQ ID NO: 601 - DNA, 547 bp, Homo sapien
  misc_feature (1)...(547): n = A,T,C or G
cattgtgttggggaaaaaatgatttgtataagcagtggggctatttgcgattgctttttttttttcttaaatatcacctattaggttgaaaacctgaaattgcagctttctgtagaaatggcggaagacaaactaacatttttaaagcgctctcatttagctctgatgagtactacacccctnatattcttctgatactaaaataattttcctagtgtagtctaaacttttttaaaaagacatgtaatccgcggagttagtaactcaaaacgagtgcatctnggaagtatcgcagccgttnctggatnaaattcccagcttgctngcttgctnagccggggggcggtnaaaaaaacatctgcagcccnggggnaaaaaccttcgcattgttcttacgtgtttacgttattttatttccctnnagcaaggcnggganttggggactcgaaatggtacagttgggctggggatcgcccttgttacataaaagncgtccagaagagggacggttacaggcnggganctccaaaggtcagtccctgccatt

SEQ ID NO: 602 - DNA, 826 bp, Homo sapien
  misc_feature (1)...(826): n = A,T,C or G
cggggggnnttacgtctctctggacgcttttattgtaccagggcgatcccagcccaactgtaccattcgagtccctactcctgccttgctctagggaaataaaataacgtaaacacgtaagaacaatgcgaaagcgttttcttccctaggctgcagattgtcttcttcaccgcccctgcttagctagctagctagctgggaatttaatccagaaacggcttgcgatacctcctagatgcactcgttttgagttacaaactccgcggattacatgtctttttaaaaaagtttagactacactagggaaaattattttagtatcagaagaatatcagggggtgtagtactcatcagagctnaatgagagcgctttaaaaatgttagtttgtcttccgccatttctacagaaagctgcaatttcaggttttcancctaataggtgatatntaagaaaaaaaaaacaatcgcanatagcccactgcttttacaaatcatttttctcttctaggtatagcctgtcaggtggcctaatgtatttttgacatctctaggaattttaatagaccagaaatgggtgccagagatatgcctgcactaatcttaagtggggatttatgtatttctcaancaagtgattaaagcaaaactaggcacgaatgaaatcaagatctttaggccagaaatcatgaananttttanaattattttangaatctgtggcttctcttcttaaaatngaaaaaaaaattgtttaaacccanaaggtctgaatacccaagcnccctgaacnanagaacaangccggagcaccccctcccaaatcccc

SEQ ID NO: 603 - DNA, 817 bp, Homo sapien
  misc_feature (1)...(817): n = A,T,C or G
nnangacttttgtggtnttatacaattnttttttctatttctatgaagagaaagccacagagtcctaaaataattctaaaactcatcatgactttcttgcctaaaagatcttgatttcaatcgtgcctagttttgctttaatcacttgcttgagaaatacataaatccccacttaagattagtgcaggcatatctctggcacccatttctggttctattaaaattcctagagatgtcaaaaattacattaggccacctgacaggctatacctagaagagaaaaaatgatttgtaaaagcagtggggctatttgcgattgctttttttttttcttaaatatcacctattaggttgaaaacctgaaattgcagctttctgtagaaatggcggaagacaaactaacatttttaaagcgctctcatttagctctgatgagtactacacccctgatattcttctgatactaaaataattttcctagtgtagtctaaacttttttaaaaagacatgtaatccgcggagtttgtaactcaaaacgagtgcatctaggaggtatcgcaagccgtttctggattaaattcccagctagcttgcttgcttagcaggggcgggnaaanaagacatctgcagcctagggaagaaaacctttcgcattgttcttacgtgtttacgttattttatttcctanaacaaggcngaattgggactcgaatggttcagttggggtgggggatcccctggtncataaaangtcanaaaganggtacaggcggaacnccaagggtcgtcctgcatttanactcggaattttggtgcc

SEQ ID NO: 604 - DNA, 694 bp, Homo sapien
  misc_feature (1)...(694): n = A,T,C or G
cttttcaaatcatttttnctcttctaggtatancctgtcaggtggcctaatgtaatttttgacatctctangaattttaatagaaccagaaatgggtgccagagatatgcctgcactaatcttaagtggggatttatgtatttctcaagcaagtgattaaagcaaaactaggcacgattgaaatcaagatcttttaggcaanaaagtcatgatgagttttagaattattttaggactctgtggctttctcttcatagaaatagaaaaaaaaattgtataaaaccacaaaaggtcctgaatagccaaagcaacactgancaaaaagaacanagcagggaagcaacacactaccngaattcaaattatactaccagggtgtagtaaccaaaacagcattctattggcataaaatagacaccaagaccaatggancagaataaagaaccccacaaataaatccatatatntaccgccanctgattatcaataacnaacaccaagaacatatnttaagggacntnctattcaataantagtgctggnaaaaactgggaaatccatatgcagaaanaatgaaactagacccctatccctcaccatacgcaaanntcaacttcggaatgggattacaaaacttaagacattccaacccaagaaactatnaaanctactattaagaaaacagatcncnccc

SEQ ID NO: 605 - DNA, 678 bp, Homo sapien
  misc_feature (1)...(678): n = A,T,C or G
taaaaatctagactacactaggaaattattttantatcagaagaatatcaggggtgtagtactcatcanagctaaatgagagcgctttaaaaatgttagtttgtcttccgccatttctacagaaagctgcaatttcaggttttcaacctaataggtgatatttaagaaaaaaaaaaagcaatcgcaaatagccccactgcttttacaaatcattttttctcttctaggtatagcctgtcaggtggcctaatgtaatttttgacatctctaggaattttaatagaaccagaaatgggtgccagagatatgcctgcactaatcttaagtggggatttatgtatttctcaagcaagtgattaaagcaaaactaggcacgattgaaatcaanatcttttaggcaagaaagtcatgatgagttttanaattattttaggactctgtggctttctcttcatagaaatagaaaaaaaaaattgtataaaaaccacaaaaggtcctgaatagcccaaagcaacactgaacaaaangaacaaagcaggaagcaacacactaccggaattcaattatactaccaaggtgtantaaccaaaacagcattctattgggcataaaatagaccaaagaccagtgggaaacagaataaagaancccaaaataaatcctatatttacngcccnc

SEQ ID NO: 606 - DNA, 263 bp, Homo sapien
  misc_feature (1)...(263): n = A,T,C or G
gtggggtcngcancagccaactcagcttcctttcgggctttgttagcagacggatcatcctctagtccactgtgntcaaattccattgtgtgggggccnctcgcctcggccanagatctgagtgancanacntgtccccactgaggtgccccacagcngnttgtnttcagcangggctnacaactcgaccggcagcgnanggctggcagaantgngcgcctnnctcattcctacgcngtnngccgcaggaaggangacaggcc

SEQ ID NO: 607 - DNA, 22 bp, Artificial Sequence
  Primer
ccatgtgggtcccggttgtctt

SEQ ID NO: 608 - DNA, 22 bp, Artificial Sequence
  Primer
gataggggtgctcaggggttgg

SEQ ID NO: 609 - DNA, 40 bp, Artificial Sequence
  Primer
gctggacagggggcaaaagctggggcagtgaaccatgtgc

SEQ ID NO: 610 - DNA, 27 bp, Artificial Sequence
  Primer
ccttgtccagatagcccagtagctgac

SEQ ID NO: 611 - DNA, 46 bp, Artificial Sequence
  Primer
gatagagaaaaccgtccaggccagtattgtgggaggctgggagtgc

SEQ ID NO: 612 - DNA, 40 bp, Artificial Sequence
  Primer
gcacatggttcactgccccagcttttgccccctgtccagc

SEQ ID NO: 613 - DNA, 38 bp, Artificial Sequence
  Primer
gccgctcgagttagaattcggggttggccacgatggtg

SEQ ID NO: 614 - DNA, 53 bp, Artificial Sequence
  Primer
cggcgggcatatgcatcaccatcaccatcacatcataaacggcgaggactgca

SEQ ID NO: 615 - DNA, 46 bp, Artificial Sequence
  Primer
gcactcccagcctcccacaatactggcctggacggttttctctatc

SEQ ID NO: 616 - DNA, 1350 bp, Homo sapien
atgcatcaccatcaccatcacatcataaacggcgaggactgcagcccgcactcgcagccctggcaggcggcactggtcatggaaaacgaattgttctgctcgggcgtcctggtgcatccgcagtgggtgctgtcagccgcacactgtttccagaactcctacaccatcgggctgggcctgcacagtcttgaggccgaccaagagccagggagccagatggtggaggccagcctctccgtacggcacccagagtacaacagacccttgctcgctaacgacctcatgctcatcaagttggacgaatccgtgtccgagtctgacaccatccggagcatcagcattgcttcgcagtgccctaccgcggggaactcttgcctcgtttctggctggggtctgctggcgaacggcagaatgcctaccgtgctgcagtgcgtgaacgtgtcggtggtgtctgaggaggtctgcagtaagctctatgacccgctgtaccaccccagcatgttctgcgccggcggagggcaagaccagaaggactcctgcaacggtgactctggggggcccctgatctgcaacgggtacttgcagggccttgtgtctttcggaaaagccccgtgtggccaagttggcgtgccaggtgtctacaccaacctctgcaaattcactgagtggatagagaaaaccgtccaggccagtattgtgggaggctgggagtgcgagaagcattcccaaccctggcaggtgcttgtggcctctcgtggcagggcagtctgcggcggtgttctggtgcacccccagtgggtcctcacagctgcccactgcatcaggaacaaaagcgtgatcttgctgggtcggcacagcctgtttcatcctgaagacacaggccaggtatttcaggtcagccacagcttcccacacccgctctacgatatgagcctcctgaagaatcgattcctcaggccaggtgatgactccagccacgacctcatgctgctccgcctgtcagagcctgccgagctcacggatgctgtgaaggtcatggacctgcccacccaggagccagcactggggaccacctgctacgcctcaggctggggcagcattgaaccagaggagttcttgaccccaaagaaacttcagtgtgtggacctccatgttatttccaatgacgtgtgtgcgcaagttcaccctcagaaggtgaccaagttcatgctgtgtgctggacgctggacagggggcaaaagctggggcagtgaaccatgtgccctgcccgaaaggccttccctgtacaccaaggtggtgcattaccggaagtggatcaaggacaccatcgtggccaaccccgaattctaa

SEQ ID NO: 617 - protein, 449 aa, Homo sapien [sequence omitted]

SEQ ID NO: 618 - DNA, 385 bp, Homo sapien
  misc_feature (1)...(385): n = A,T,C or G
ctgtgctgagaaccaaaagctatgancactgcttttccaaatgtccataanaccaacatttttatcactaccaccatcacctgggagctcnttagaaagctagtctcccgggcaccaccctggcctactgaacctaatgtgcatttaacaagattnacgtngaaatctgcaaagcacaggggcngataacagtaccacctgntctggttcctanccccangacccttacagtctaactgggacacaagggcttnaaatcaaattgcctatcattaagatatacaangancntgagaaactgctncacttatntattaaggngctctaagacttagaaacnaaangcantgctgagangattcaaatatgangggggncactttnc

SEQ ID NO: 619 - DNA, 869 bp, Homo sapien
  misc_feature (1)...(869): n = A,T,C or G
gatatcccgggaattcgcggccgcgtcgacctctacttgtttagacataaatgcagtctagcattaaagatcctttaaaaaaatgttttcccaatggttaaaagacaagctcaaataaatgaactctcatacatatgccaaaattgatgagtagataaatatttcagtaggtagttactagctttctgtgtatgagtaaacatatgggagaaatttaaaacactaaagtagactcaatgaaagcatagtatcctatgtattcgtttttcagaaatgtctaatgaaggaaggaaacaatgaatgaatgcccttattcctcttagagtgctgggacatggttttgcctgaaaacttcatgtgaattttatattttgctacacattacacccatcttagacttatacgtataagacataaggcatatcttatgtcttacatgtataataatctaagcagaacaaaaaataacgaaatattttcttccccaaatttttgagacagatggattttccggaaagatgtgtttagcttttaatcctgtggttttgtgtaccacctggcacactagagtgttgctctaattcagtgagttgtaactctgggtgaacagtggaaatactagggtacattttaaaaatgctaatgctcgggcctcgctgaagaccaaattaattggaatctctgngggnggnattgatctttttataatctttctanangattctaatgggcttccagggatgaaaaccnctgntggagctnggaaccttcctttagtttggagaaaccccgatgagggtntnttaggcnccgcctntttttggcctgggcttccccccttatnntnttttggaanggnccnaattttt

SEQ ID NO: 620 - DNA, 339 bp, Homo sapien
  misc_feature (1)...(339): n = A,T,C or G
gngcgggcctcnccgtgcttgctctcgctgccgacgctctttttccaccagctgtagganaagcccgaagaccactggtcccccgggtagcccaagtaccactggtcctcctggctcctgacgctncgggtcttcctcgtggcgtagactgccagcttcggagacccctcagcccctccccgcttttctccaccccaggaggccatcagtagcgagctactgcctcggccacaacctcccagcangatagcccgcggtttccaatctgcgaaaggaggaccgccnagcccgaaatgccnagcccagcnatcactgccacgccgagccnagcgctcgtgc

SEQ ID NO: 621 - DNA, 267 bp, Homo sapien
  misc_feature (1)...(267): n = A,T,C or G
ggggngcatggtcccnggtagccaagtacatggtcctcctggctcctgacgctacgggtcttcctcgtggcgtagactgccagcttcggagacccctcagcccctccccgcttttctccaccccaggaggccatcagtagcgagctactgcctcggccacaacctcccagcaggatngcccgcggtttccaatctgcgaaaggaggaccgccnagccagaaatgccnagccnagcgatcactgccacgccnagccnagcgctcgtgc

SEQ ID NO: 622 - DNA, 847 bp, Homo sapien
  misc_feature (1)...(847): n = A,T,C or G
cttangntgtcgactgacgtcatgcatganttaaagcagaggtttggtgaaatttatgaaaaatacaaaattccggcttgtcctgaggaagagccactacttgataactctacaagaggaacagatgtgaaggatattccctttaatttgacaaataacatacctggttgtgaggaagaagatgcatctgaaatatctgtctcagtggtattcgagacatttcctgaacaaaaagaacccagtctcaaaaatatcatccatccatactatcatccgtactctgggtcccaggaacatgtttgccagtcatcttctaagcttcatttacatgaaaataaattagactgcgacaatgataacaaactaggcattggacatatttttagtacagataacaactttcataatgatgcaagcactaagaaagcaaggaacccagaagtggttacggttgaaatgaaagaagaccaagagtttgatttgcaaatgacaaaaaatatgaaccaaaatagtgacagtggcagtacaaataactataaaagcctgaaacctaaattagaaaatctgagttctttaccaccagattctgacagaacatcaggaagtatatctacatgaagaattacagcaagacatgccaaaagtttaagaatgangtcaacacattagaaanaaganttctgggctttgaagaaagaaaatgttccacttcataaagaaggttgaaagaagaatgggagagcccngaantttttgcccngaaattttcgggaaccctactggatgggtcnactggttggccatgaatgaataatggactaatcnnccaattcctngggaagggaat

SEQ ID NO: 623 - DNA, 681 bp, Homo sapien
  misc_feature (1)...(681): n = A,T,C or G
aaaactgtactcgcgcgctgcatgtcgacactagtggatccaaagaatcggcacgagcgaaaangctcangcagcccggctggccgccgccgctcctccccccaggaaagccaangtggangctgatgtggctgcangagctcgtttcacagcccctcangtgganctggttgggccgcggctgccangggcggaagtgggtgtccccangtctcagccccaaggctgcccctcacaaagcactggtggtttgcctccactgccaccttgggctccgaacccgctcccctgctgtggangcccaccgtgggaatccaggtccccaggtggactgcctgccttgccctcactgcccactctgcccacacttccctgcctaganaccgggaaggggctgtgtcggtantggtgcccacctggatgtggcagcaccgactgtgggggtggacctggccttgccgggtgcaaaagtgggggcccngggaaaagcacctgaagtggccctgaaaaatccccccttaattttnccccaatttggggctcnaacaaaaggaaattgctgaagccaanggtaccaaggtcacccctaaggccagggtgaaaaggtcccaaaattccaatncccaccntttgggcttncctcttggaaccccggccccctctcntgaanttttaaaaaan

SEQ ID NO: 624 - DNA, 661 bp, Homo sapien
  misc_feature (1)...(661): n = A,T,C or G
attggtcttactgtaccaccgggtggaaatcgatggccgcggcgtctaaatatccgattttttttttttttcctcttctgactgtccatggacaaatgaaactaacttaatctaactaaaaaacacaactatattttgaagattttctatctgcactcaaggacactttccacncggttgttgttaccttttggtcttgtctctgaacatgaaattnatctcaagggattngatttctggacctcctattcctgctatgggtttgatatttcttgggctccagggccactgttgcattgggntgacagntacctcctagcccatancctcctatcttgggaaacaaacctaacaactacgtgtaccttccatagatctctgattgagtctcagtatncgcttgctcatgggcgattcacttgaatccgtnattggtgccaacaatcctgactcatgggnnaatggatcctatcacgttcccctgattngcaacccctgtatacatanatctaatcgcatagaatctagcntnggntatgcgcggctacgctatcagggnttgntaactatngcatggctacgaancctgatcatgatcnagggtcatggactcttatcaggggggttgggccgngcttctttttcnnaccttggtaaaacc

SEQ ID NO: 625 - DNA, 181 bp, Homo sapien
gcaacaatcagatcatgttaaagtaaatctccattgccctggatcacttcaggatttaattgtccaaggagagcagggttctcctgtgaaaaaaaggtggggaaatgtttgagagtaaaaaatacaaaattcaaccggtcgaaaatacaccactccattcagtgctctacccccataagcc

SEQ ID NO: 626 - DNA, 181 bp, Homo sapien; identical to SEQ ID NO: 625

SEQ ID NO: 627 - DNA, 813 bp, Homo sapien
  misc_feature (1)...(813): n = A,T,C or G
accaagctggagctcgcgcgcctgcaggtcgacactagtggatccaaagtgaacgtgaaggtgagcagaggagaacttgcgatggcaaagttaaaaacaagaggagatgatggtcttggtgtggcacaggatgttaaaaaaattctcctgtccttaaggagttactgctatttgagtaatgtgccacttccctacatagccttctatgcagaaatgctatatttccacttcacaacccagaacgtgcattttattttacatttagaggaggaacaaacaaccagaaggcaaaaactggtgcattattttttgcaattctcttggaaagagttcgtttttaacttctgctcagacagcacacaactactgggaatatattttaatttcaaatctgatgtgtgacatctggtaactcatttattgctaatgaagttttcacaggaagcagcagtcaccagtagctcatcttatttttcagttggcaaagtgttgtttaccttttattggcctgcatcggtgtctcttatcacaggatatttaattagaaaacgcaagtagcctaacatagaanagaaatggagtggtagataatagtagatagaatggctaaatatttttattacagtgatgtaatatcactgnaatttatggttaaaaattatgtaatactcaaaaggaattctcagactggcgaaacagctggncaacagctntcacagggctttnanctcctnttgagctttccccctgntggactttagtcttccttttacncccgnagttnccattnnttaccaattgtnccgggaaana

SEQ ID NO: 628 - DNA, 646 bp, Homo sapien
  misc_feature (1)...(646): n = A,T,C or G
tttgggnggnggtgtctcntttgggtggactttttgggtcgtagggccccaaggccgttaatcccgtaataacggaagacgaagaagagtcagaagagtgcttctataaggatcgggacgagactaccttagaggaataaaggaaaaaagcagaggaggaagagtggtagaaggagtcagaagaaacccacacgtcgttctgaacctggagccttatcaaaaaggtctagataaacgatagcgatctcgatatcgagctcaagaggtaggtttagagacttctcgtcctcgagagcgaaatggaagatctcgacgacgataagaagttaaagtgtagagggtgcttgaggagcgcgtggaaggattctgcggagggacccatcgacgtagagacttgaaggcctactaaggtccacaagaagcccggctctttctccgaatggtcggagcgtacagtatgcgacgtcgatcggcagacaagctggcggtagactcgaagtgttcgggcgaatcgacttataatagtcgcgcgctagtaacgtaggaacacgaagagtagtcgaaagaaaacgtttagtgagggaaaagattagggaaaaaggagaggcttaataactaagacacttggagcctaggccaacgcgaa

SEQ ID NO: 629 - DNA, 617 bp, Homo sapien
  misc_feature (1)...(617): n = A,T,C or G
gcccccncccccctcctngggcttatngggacagacccacgtagtactctaaatcttctcctacgccggacaacggaccctataccaattcgaatcttggacactccgaccgccggattctcttcccctttcggcttcccctttctgtcggtacccctccctagtcgtctcctacaccttcgtaccgtcgatatatagtcgccgcggactagcctatttaggtgtcctagactcgttattgatccactcattagtctagtactatgcgtcacgtatcttagttgcctaagagggagattaaatcctccacaagttccgacgaattcctggactctcgtactagcaaactttcttatgaggcttccttgtatatcttctggatgtttctcgtgtcccggtcctccgctactactagagctccttgccctatctctagaagtagaggactctcgggttcgttctccaaatctagcgctagagctatcgctacccgctcgattcccccagcggaatcttgaaacctgaggtagtacacaaaccctccncatcttccctcggttgctccttcttctcatccccccttcccgccttctcgggaangaatctactttancttc

SEQ ID NO: 630 - DNA, 644 bp, Homo sapien
  misc_feature (1)...(644): n = A,T,C or G
cnntcggcntgggttttnttctgagnnncccccccccccccccccccaaacttacacccaccaaacactttccgccccctacctaggagacattagaagggtttaggcttcggcgtatagtaaagtcctctacctcggaagtagagaattcggtatttaaattcagggttagaggctcgctcgttagatttatagtttaggtttagaatcggaaaccttcgatcttccttagaagggtaataagtgaggccctaaatccgtctaaccaaggcgttaaggtccgtacctaaacctagtcttatcttctatcaggcgcaccaatataggtaggttctactttcgtataggccttaaggaatagttcggtagttatcgaaggcactcctctctaggctaggcttttctcagtcttagtactccgggaccgtcgtcgcanaaatatcgatggacggtaggtatctccgcgttacgcgtcgggctagggatatagagcgaattatcggcgagaggcggtcgctangaatcggtatcaatatgntgttctttaccctacggatatcggcagaaaacataaaaccttctnaccanggataagggattatcggacccctaaaataacagtaacatttagantactagtaccc

SEQ ID NO: 631 - DNA, 526 bp, Homo sapien
  misc_feature (1)...(526): n = A,T,C or G
ccntcggcttgggtttttttctgagccccccccccccccccccccccccccccccccggccccatagccccaccggncccacccaaattttaacaaaataaatntacctatcgntcacctatcccncgtatcgngtaggtcggtaccggtaccggngatcncnacgattnttcgggtcgtcncccttaanacggncccgtagccnccggaanaaatactacgagngactctaatntagcaanacccgccgtcnattantagcatccttagtcttccaatgncgnggattnngaatccttnnaagttatcgggtagaacgggtcccggtcccccgccctctttncaattaacgccgggtacaaantcggtttctaaattccncacgaatttngncggcaacattcncgggnccttattanccntttccaaccccgatacncnagctcgatcgggctttancgaatccggggtcncccccgangantccgggtcctttgagtngctctaggacggttacgacggagga

SEQ ID NO: 632 - DNA, 647 bp, Homo sapien
  misc_feature (1)...(647): n = A,T,C or G
tttgggnggcgggngctcatttgggtggactttttgggtcgtaggaacctggtatgaggggtgttttgagtttcttcttcgtcgtctctgggaggttcggtttcgattgagattcgggttcgtctttatcttacgaggcaccctgatattgttgcgctttggtttggttgtggagagttttgtcctactctagcgggtcatgcggatgatatgtagcctgcgtggcctgatagtgatgttgtgagcttgagaggggagttgtgggtgttgcgggcggagtaggaggggttggagcaccgggattgggagatatagaatcataagtgttaggtataggtcgattgagcgagttcgtggaattcgtgtggtcatcataattagagtgaggatgggctctatatttcttagaggacgcacggtcgtgattcggggtttgatgggtgttcttcttgtgggcacgattagcttgttcatgatggtaaggaccatactgtttcgaatgaggattcgtgtcttcggattgttgtggatattgtggnctanactatttagtgtaagccggaggtggtttgccgtggtggagtatccgannttcattcgganggtatgcgtgcggagcggtccttgtagacattccggaaaaatgg

SEQ ID NO: 633 - DNA, 630 bp, Homo sapien
  misc_feature (1)...(630): n = A,T,C or G
tccttcggcttgggtttttttctgacccccccccccccccccccctcggaaggcctctaggctcccacccgtctctctaatcctcaggaaccgatccacccaaccaacttactaatgtcctacagtaaacacccgagaatataaacccacacctaggcctccaatcctaccagggaagcaagaagccgtagtctagcgtattacgaacccgagatagagacggagatacttagttttattctctcggaataggaaagacgactggggagggaatataggctagcgcggggataggggctatggcggatatgggggcgggtcgctctcttattcttctataccacgtcaataggaatgtagatatacctagatgttcccgtagaaagagacgttagaggtctccgaagctataaaggagaggcgcgaagaaacttcgtactctagctttatataggtagtcgctctagtcccataagcgacgagagatctactagatttcggtatcgccgtcgtatgtattcgaaatagtcttcttccccttttcgatctcctctctatactacatggngattatagtcntaagatagtcaggatattaggatattagttatatgacgttcgacgggacgg

SEQ ID NO: 634 - DNA, 647 bp, Homo sapien
  misc_feature (1)...(647): n = A,T,C or G
ccntcggcttgggtttttttctgacccccccccccccccccctccactaagancttaacccaaccctatagtttactcgtataggggaatcgaggagaaataggaacgaagagcgggtgataaagagaaagtactttcctttatatgttaagagcttagcgtaatgactttcgttatatggctagttgattttatccggcgttatagggcttagttctggttatctcgggtctaattcccttagtatgctcgggagtttaacgaggtcacgggatagcgcgtaccctttctaaggttcttggaaagctattcgttatttatcgcgattctcgaggtcgaaaggatcaaggatcttcccttttactaccctagtcgggttagcggtcggtcaaaactagtgtagtacctttacctcctcgaaagttatagtcgaaacaacgtattagtcgaaattatagcggatagatcgagacggttctttctcgggttctcagccggtaatccctctatttgggggtcttctccctcttcccctttgtcttccgccttagcttccaaggttcctcggaagcgaggggttctacttaagtcgntagcgttccttataaaccncctacaggcagacccccttgtaaacggctcggggt

SEQ ID NO: 635 - DNA, 645 bp, Homo sapien
  misc_feature (1)...(645): n = A,T,C or G
ccttcggcttgggtttttttctgagccccccccccccccccccgaaactcgccttaccctagatacccaaagaatagttccactcaacttcgtctaagtaaaactctagaacttccaaacataaaagacttcgcgcggttagctacacagcctacgggaatctcacgaatcccgattcaagtcccactctcgaccacaccccggtatcgtcgttttcccataccaatgtcgaaaaataaaataaaatccagtcaagccccacggtaagcgggggtagggctaggcgaagaggcaggaaccgttcgaggccgggggctttcaaaatacaaaacaactacttaaagtttaccccttctaaagtcgggggcaacggttaaagcacgcctctaaagtactactcgtttcgagaaggggtagtcatctcccgcatagagactctcgcgtatatcaactcgcatcgcttctagcattccgacggtcgcccgcggctacatatcttgcggattagctccgagggactatagggttaattagtctagtaaattctcttagaggatagtcggggtcgtagttaggcagtacgaggggacatggnctgcgtcgtgctctaccttgacagcatactcttataaacatctttttcct

SEQ ID NO: 636 - DNA, 643 bp, Homo sapien
  misc_feature (1)...(643): n = A,T,C or G
ccttcggcttgggtttttttctgacccccccccccccccccctagcggaaaacaatccccaccgagattttattaatcgtaaaactcgccttcggtaccaagtcttcctccttcccgtaacctggctccctcctagnggctttacgaacgtccctcctcttcttacggctcggaagtggttacggttaaatccggaggnggggctaacgaatccaaggctaactcctcttanagtttgttgtccncncgtttagtaaggatccgtggagggcgagtatttgncccccggcctttattntatagttccctagtacgataaagntaccggctatcctattacagcggataaaagttatttanagggccgacgtcnccgctagacaggctacagctagnggaggtaccgcctccgactantccgttgnttccgacaaggnagtttcggttaactccacaaactcctccgccgactctanggtggggacggcagttcccncgtttagtgtgcgttatagagaagggcatttgagttggacgttacnttttaacataggttattccgtttaggttcttgcgggcccgtgggggtagtncnccggcgcgttnntatcggcgattttccgcagtttccgtttccggntnt

SEQ ID NO: 637 - DNA, 631 bp, Homo sapien
  misc_feature (1)...(631): n = A,T,C or G
gggttntctcatttgggtggactttttgggtcgtaggaaccggtatgnaggagtaggagtcgctgggaagactagaagttagctacggacgattagtgtgattccactcttaataacgagtaatcgtttacgtcgggttggtgtttcggggttttggagagtaagcgtagttgtggagtttcgcatataggtccccttacttcggcgatctcgtcttctgtcggttaggttattattgttcatccttcgcattagtagtagggttggtcggataaatcgatagctattctttagaattcgtagtcggagaattcgtgtacgaagtcctttaagttctttaagttcgcgagtaagacgtgtacggttattttgtcgtcgacgtaggtgtcgtttacgggagtttcgttttaggggtttacgtagaacgttattaagcacggtaatacgatagaggattacgcgacgtattcgtcttagaacgtcgatttttcgaaggcgcatttgttatcgaaggggagtccttggagaatcgagatattccaagaatattacggagattacagatcggaaggctcccgagatcggacgtattaccggtctcgcccgaaacgagtaggtatcntccggataa

SEQ ID NO: 638 - DNA, 606 bp, Homo sapien
  misc_feature (1)...(606): n = A,T,C or G
ccccccccccctcaaccatcnattccccacctcaacgcgaattacggtttcgaaagtcgacaataagtccggtcgagtagagggaatcaggggctggtanaaaggaccacgggcggaaaataccggtctccttccggggagcgacgtcggggaaagggaagagagcggtctagttcgtaggcaaacaggtcagaaaagttaaggttaaaggtcggaggggagaggatagctagtacgcttagttcggggctcgggcgcagggccactttcctctttcgcgttcctttactctgcttacgagttcaggctccggagttccgcgccggaggtcgtcgcgacgctaggaatggggactcgctcagtccccggttatccttcgggattctatgttttcgccgatagacggagaccgggtagtagggttccgtcgtaccgccactcgtcgccttgatccggcccgctccgcttaagggcgatgaaagattaggtattagggctctacgggacgaggcatagggcgggagaaggggggaggggtcgggggtcgaagggantaagaaatcgcantcgcgcggggtcggtagganccgaaatttttctcnncgt

SEQ ID NO: 639 - DNA, 592 bp, Homo sapien
  misc_feature (1)...(592): n = A,T,C or G
tccntcggcttgggtttttttctgagcccccccccccccccccccgggaacgagaaaacaatcccaccctaccgcggggagtgggttgnacgcttagttctagaatcctcggaatcgtcctccggcgttggtagttccggcgattccgagtatgccgaagtgtatcgctccgtctagaggttggtatctgtttatcgcgatgacgctattgactcggatgctttcgaagtagggggataggcgcatagatacgcctccgcggtgtcctctgaagtggccgcatccgtggacgcagcgtagacagctctggtggacgataacggcttctcgtactcctactccggctattatgttagagaggacttgtttctgaacggatataccattagcgaaggggtaccctccgctaacgcaggcgtttctaacagttcttccgggcgctccgaatttagattgacgcctccgcagcattgtgggatcctcttccgttagccctctttataggatttctcctccgccccgaaaganggctggtcgtccccggcangtatgtctagctcgaacgctttgttactcctttgttttcgaaana

SEQ ID NO: 640 - DNA, 637 bp, Homo sapien
  misc_feature (1)...(637): n = A,T,C or G
ctttgtggcggtggntgtctcatttgggtggactttttgggtcgtaggcttatccgggtngggctcccgaagtagcttaggatcgccggctagttccggtcccgcccgtcgaaagcgcggttcggcgggcggccccgcgttcgttcgcgggctttaccctcatagagtgccaggtctcggttcttacgggttcgtcggcgatagattttacggcgagaggtcggtatcttcgccgctttacgttcggtcggcatctacgcctagttcacaggtagtttatgcgccggagcgcgtgacggagaggttatacgggacgcggaagaaccgcctccaaatgactagtacaggctcgttcgggcgtagatctcctcgctcggtcggcggttcttacttctagggccgctctacggtttaaggcggtcgttagatcttagaaactatactcaagtttcagtcggaagaaaggaagtagagagaagggtaaacgattacctccggttctagccctttttactcgcataacgggagaacggggtccggctctcagatacgcctcgcgagacgtcgcgattcaactttaacctccgctagggcatccgtatacggttaacgcggtaaaagcgacctcggaaacctc

SEQ ID NO: 641 - DNA, 649 bp, Homo sapien
  misc_feature (1)...(649): n = A,T,C or G
ctntgtggcggtggttgtctcagtttgggtggatttttgggtcgtaggnaacctggtatgaggtctagtttcttcaacgattcttggttcagttacgcgaccctatccttatcttacaatgtcttctacatcaggttcatcaattaatatatcaattacacattaacgacggtgtgacgcaatatgagaaagtatacattaaggttattatatattattcgcttaaaaaggttcctgacatgggacaacttcacccaccattctagaagccccccctcctgtaggaccccctcgagttccccattatcttagttcagttttcattttttaaccaggagggtatcggtttttaataggtactattttgtcaaacttttcagaagctttatcttcaaatatacttgcaccatctgtactaggagcactaactattcgagtctattacagctcaacagaaaataattgaaattaaacaacctaagtatcgtccaccataaccccatcgggctctcaccccatttcttcataagttctagagcatcctgagctctttcctattacccttgatggtactcatggtctaataccccccgcagttataggtccttatggatcctatgctaccaccggtctaatcccttctatcacn

SEQ ID NO: 642 - DNA, 645 bp, Homo sapien
  misc_feature (1)...(645): n = A,T,C or G
tccttcggcttgggttttttttcgtcgcgggttactattatcgattgttacttgtaaaggcgatactcccaccgctcacgatattagacctgctcctctagaagcgaacggcgataggtctactcggccggcgaagacggcgaacgggtaggaggagccatatgcaaccctaacggagattataagtactgggaaaaatactagtattaaggtagcgggttaagataggtggagagacactattcacgagcataagcacttagaaggtcttctcgaggagaggtaggctacggactacgttccttcttcctctagcctcgagagggagtatagatgattcgcaaaagagaatccctcctatacgctggcataactagacgacgcgtcgtcgggaaatctcgccaaccctattgcgacctccaaaaggaagattgtcgtttcatagaacgctaatactccgggtcttcccgaatcatagccgcatatcggtaagaagacggtaaaatcgcgcgattctaacaagattctgtagacttaaggctaagcactagaagcgatctcgattccggatcttaagatcatactaatagttcggtcacaccagacgacgattagccactagaagccctactccgtngaaaccgg

SEQ ID NO: 643 - DNA, 586 bp, Homo sapien
  misc_feature (1)...(586): n = A,T,C or G
ctttgtggcggcggtgtctcatttgggtggatttttgggtcgtaggaacctggtatgcagggtccgcccggaattaaaagcgggatccccaaaacgnngnttcgcaagaagagaagaatcatagcgataganctttcatagtacaaaggtaactaagaggaaaataatgcagattcagaactagttgccaaattagaactcgattaggccaaggatccgagcctggcgctatcacttcgggacttaagctacggtagagcagtcggtcctgaagcatagctcccgtaggacgtaggaaactagtccggcacggaggacatactctcgagtctcggaacgtctatttagaatataaacgcattaacctcagaaggcgccgacgcggttactctctagggaactatttcattccttccggagctcccctatttttccaacacatataccggcaaaggaaaatcttntgtcctcggtctaaagagagggaaaaaaaacgatatctaggttcgggtttatccatttaaaaanatngacgcgactactccctttcaaagggagtttccccctaggnagagttcaacngaag

SEQ ID NO: 644 - DNA, 646 bp, Homo sapien
  misc_feature (1)...(646): n = A,T,C or G
ctttgtggcggtggttgtctcatttgggtggcatttttgggtcgtaggaacctggtatngagggctatttgacttgtttctcaaatcccatggtatggtgggtggcgtgcggggtggcggtcggttcggcgggggtgggggtcgtcctccaaaggagttgctagagggcttttagtggttttagggcgggaaggggttagagcggagagacgtcgtcgtggaagcttctggcggagcgcgagaaggtagttagcgccggttcggaagattctcagaattcgagaagaggtagtggggcgcggagagagagtttctaagtctaaacgtagaggtcgtcctagtcgggccgggagtagcttttaagctagaggtcgaggtcctcgtttaggctccgggctcttcgggcagtatcctctttctcgaggaacggagcgaccgacgtcgtagccggacccgtctatccgtacgtttagagatacgctcacctccacgggcgtatatgcccgtatacgtataaacgcgtaatatactcgcgcgtaaaacacgtatacactatatacacgcatcgtacggaccgtatagcgttatacgcgcgcgtatattaatttacacttatatacgcgttaacacgatatatcacacnccg

SEQ ID NO: 645 - DNA, 654 bp, Homo sapien
  misc_feature (1)...(654): n = A,T,C or G
nccntcggcttgggtttttttctgaccccccccccccccccccccggtcgacaacgtgcccaccgttgccatcccagcatagctggttcgttctgttttattcttagtagtttagttcgcctatagtccctcgtctatcgtctatcatttaaggaggcggggctcgctctttagggcgggtatcttaggtattcttctggtttcggctgccgtctcggagtctggtccttttgctttcctttcttggtcgaacttcgtgtttgatcgcgttgtttctttggggtcgtcatacctaagggccacttcgccaacaaacaagtttgtgtagtcgtttctattagggttcgctggccggcgctcttactggttggcgatttttaacgcgtttggttttaatttgcttcctcccctagggctcgctcggtcttctctctgttcgctgctctcgtccggcctttggtgcggggatagctccggctattancgtgccgtgtccgtgtggnttttgtccaatgtgaaggcctaggggtgcgggcttctttggccatggnttcccctcttgtganccttaggggtaacgantcgtaattnaaggtcgggggttggnatacgttntangggangcctgngtccgntattccttgttttggcctn

SEQ ID NO: 646 - DNA, 645 bp, Homo sapien
  misc_feature (1)...(645): n = A,T,C or G
tccttcggcttgggtttttttctgagcccccccccccccccccccacgccaagtacacagacccaccaaaaacaacgtcaacacaacttcgggtatacggaccttaagagagaccccgtagtagaccctaccacagccatccaatagtcaaacaacaagggcgcacccaatccatccatagagctatcaaacaacggaggggaaaggaaagagcagggtcaacttagcagagatcgaagtcggcactaattcctttcaagtactcgctcggcttgtagttcggggtaaagtccgctctcaaagggccaacgaggttttaaagcgacccccgtatcgagtcttcttcgtattcattaaggcgttaaaggtacgagacctagaagagagtagaattagcccaccaaatcgcctaaaccggcaaaaacgaccaaaagtcaaagacccttacaaatatcaccttaaaacgccaaccccaaaaacgcgatcagtaacgcacgtacctttcccacgcttttctttctttcactctccaaaacaaacccgaatatttagcgcaaaaaatatccgagggagaattagaagctattacccgaaaaaaaancggananggantaaatngtggggaatanacgtttggtttttctg

SEQ ID NO: 647 - DNA, 753 bp, Homo sapien
  misc_feature (1)...(753): n = A,T,C or G
accttacctggtaccgggccccccctcgagtttttttttttccaaatacaactcagattgtatacgaaaagctgataatacattgacttttgctgtttaaatcccttgagcctttgataatgattttttttgtgttaacaattgtagtatataaaatcggattcaccatccttctgatgccatattgattagtttgattttatggtgatgggatcattgtgtgttaactgtattaagaagaaatggatttgattgactttgcatccatttttatctgtgttactttcatgttttatttaaaagcatttctggaccagaataagttaagtggtataatttgctttttacacgtttatataattgaagttagcaatgtggcaaaatctctaatggaaataaaatgcttcagaatgatgacataaatctgagctatttcttgcctggagaacaagtgttattcataataatttaatagcttctgaggtgttttgttcatgtgatgaaggcttatccaccttgtatcaattcatgggctctgctttgtttaatgtagtcaggttgttaatacnagacttaagagtcatcctactgtgataagtggtgagtgaagattacatgtcttangaaaattatactgggaatatctctgacattaatgggtttaaatgttttaaggctaggggatgatgcaatgganaanatncttccaaangtttctggttgtttatatttgnggaagncatnaaganaccg

SEQ ID NO: 648 - DNA, 383 bp, Homo sapien
  misc_feature (1)...(383): n = A,T,C or G
gatatcccggggaaatgcggaggcctttnggcttacgtgtttaccgcgtagggcaaagccttgncaaattcccggccagcggagcggcgagggtggggactcacgggaagttaaacagcctcgtcggcgtcctcgaggctccaaaaccaggctctaggcggggacgactgcagccgttatggaggccaccgcggctacggccgcggctgaggcctccccaggtggagcggtggcctggaggggaatcttgatcctgggccagccacctgtcaagaggaggcggagcgtcatgcctctggaagactggatgaatattctccaggagcctgacgaaggcgaagaagtctttgcagaggaaattgaatgctgtctgatgctacaat

SEQ ID NO: 649 - DNA, 349 bp, Homo sapien
  misc_feature (1)...(349): n = A,T,C or G
cgattgtntacnagtcttagagtaagcttaagntcgntaccgagctcggatccactagtccagtgtggtgggaattccattgtgttgggtcactagtaaatggatttagctagacanagganatttaccctattccatttagcacagtgagganaggctanacagctaggatgcaataaaaaaaattttaatgagaaatgtgtgtggtagattaattctattaatctcaagttatagattaaaaaatttaagtaccncataaatgccatttgcctttgctaangntacatttttatgaanaangaccntgcatacnnaatganatactggactttnggnacttgangga

SEQ ID NO: 650 - DNA, 306 bp, Homo sapien
  misc_feature (1)...(306): n = A,T,C or G
cattgtgttgggagcatccttccatcagctcccatgagaaattctctgttgggtttaagcaatccccaaatatatcatattgacatgaatatatcatctcctcaatgtccagcattagcagacaagatgagtgctgaagatgatataactcctacctcttatgtaggctagaggtaaagtctggctctgctgactgtggggacataccgaaaaggaatgtgggttaatatcagangacctccctgcagatccganantcagggnctggactttctggganaggaagcnnaaagttatntctgaacc

SEQ ID NO: 651 - DNA, 769 bp, Homo sapien
  misc_feature (1)...(769): n = A,T,C or G
cattgtgttgggcagggtcatttctaaggcatgggctggaagcttttatttaaaactttacatgtcttagaagcactctggttgttgctaggcagacaattttacatctcttgctataccagttgcatgaagttcatcatgcatattggctgtggaaaaccttaacagcatcatgtcataaggtttcagtaaggtttaaatgaaatcatgtattaagcacttagtatagtgcaccttaaatgttagcttcaaaacaatgacaacctaactaatgttgaaagaagcttgtgtttgtaaattatgtcttattgaaagatgtcatcaaatcctgttatttctaatcccttaaagtctctcaatgtatttctttttgccatatccaatgacaggaccttagtttaagccagtggttctctcaacttctaatccagagatacctgggtgtccccaagaccttttcagagcatccttgatgtcaaaaccattttcataataatattaaaatattatttgctcattgtactcttattctctcccaaatattcagcgagttttccagaagctatataacatgtggtaacatcttatcactctgacgattaatagaatatgngnttttggattcttgngtttaaaattttctcactttggggttctaatatggnnacgattaatagatatggnctccatgaccaganggctttaaagcantcaataatttttaagagactaagnactatcctttaaagatngngaactccatcttaat

SEQ ID NO: 652 - DNA, 267 bp, Homo sapien
  misc_feature (1)...(267): n = A,T,C or G
nnangccctttaaccattgnggcctccacgcnntggcggccgctctacaactagnggatccgcnactctagnanaangattggctcttntgggntgggccggncgggctggggcgttaagcggggctgggcgcgcgccgnggttgnacnaggcgccgccgcccncacacncccggagcaccctcnttgcngccntnccccgctcaccccgcgcgcgccgntccgctttttccncacccanagcnctntttatctntgtctcctccgg

SEQ ID NO: 653 - DNA, 501 bp, Homo sapien
  misc_feature (1)...(501): n = A,T,C or G
cccnttnacccattgctggactccaccgcggtggcggccgctctanaactagtgggatccttncnatgagatgngcganggaggacnnatttgctatnctggatggggctgantcntntagctnctctagcancagatgggttatcgaggaagatgactccaangggctanantcctatgcncatcctaaaanncanctgctgtnttcagagtacgcgacacatcatcnctnatgcattgntgancaagacgggcangtgcttatcctcagcgangatgcccttaaccangagctcgaatggacntatcaccntanaggtacanntnccgcaccacacaccngcttgcnncctgacgctggactggatcncttaggccaccaatnccccgtttnccacatncctgggacnctananatactcganggggggcccggtanccaattcgccctaatactgagccttgntacgnacgctnactnggngtcctattanaacgttg

SEQ ID NO: 654 - DNA, 710 bp, Homo sapien
  misc_feature (1)...(710): n = A,T,C or G
gcgnctttancncatgctgggctccacgcggtggcggccgctctacactagtggatcccaacactgagtccaccacagnaaaactcancaccaggcagaccccacaactgcagaatccaggctgcaattcacagactaatcntctagacccacctcagtaccagatggtaccacacagctcaaggntttaggtttgcgtggtanactcaatctctatctttcaccactgccagcctgacttcagagatcctgngctctggacagtcctcagtggcaggcaactctcaggagcctcaggnttttggcacatcccagnaccagccagctgccacaggccctgaccttntancaacactgcccatgtattccagacttctancataccacagtgccatgctgattgcatctatagangctcaggtgcncctcaaanctgtgcctgctgcagnangccccacgtctctggcatgccccaatgccatgngtggnaacanttgacttctgggcatgntggaattccctaccactgancctgaccataggngggancccatttttttcgaggggggggcccggcccccaattccnccntatagngagncgtanttacgcgcnncttactnggccngtngtttaacaacgtcnntganctggggaaaacccctggnngcnacccaaattaaacngcnttgcannacatccccctttcg

SEQ ID NO: 655 - DNA, 202 bp, Homo sapien
  misc_feature (1)...(202): n = A,T,C or G
cccctttnccctttcancccccccgttttggcngccgccnacacctactncatccacccacantcgaccacccgagcttttttccgatcccancatcnatgcngattttntctntgcntgctgngcctgcacctttgntaggtcaagcctggcccatcttcgacaacttcctcatcaccaacgatgaggcatactctgacga

SEQ ID NO: 656 - DNA, 308 bp, Homo sapien
  misc_feature (1)...(308): n = A,T,C or G
gctgntgaaagaccacaccgaaaaactctnctttccgacttccacatgatgatcngcatgtggtggtgagagacttatcatgacgacatcgcttccnaccatcgcanccnctgcccaagcccattcatggaggcctgggnanttctgtgantgacntngacnctanacnctnccactgtntgctatccagacttgnttngaatatnttattggcnaaanacanttncggaatgctgtgnttgnncattgaangatctgatcactatgagagggtgaggacnncctgctngctggcantntntaacccn

SEQ ID NO: 657 - DNA, 696 bp, Homo sapien
  misc_feature (1)...(696): n = A,T,C or G
accntttccacaatnctgnnctccccgcggtggcggccgcgtcgaccagcaacctcagctgtgggtcttgttacagtaatgagttactgtaaggaaagtgtgacatttcgagcaatttgatttgtttaaaaactagagcagtttcagggttttccttgtaaatctgtcttatgtgtcttcaatgttctttcttgaggagtagagaaaggaattgttaggaatgatgcataaaccatggcttattttatctcgctgccacccataatcagagcagattcttgggactatgaccctcatggagacatgacaattgtgtgtgtggtgggtgggagaaaagagctgggaatttttagggtctagagggtccaatcaggactattttatggagctctgctcaccaactttaagtgagcaccaggggtgngaaagcgaatcttgggntcaaaanaacaatggnaaggggtaagttggtatnctgaactggccacttcggactcttatttaactgggtattctcanttaaggaggcnngggtggtcttggcttgtnaaggaaagcctgtgcaatggaatgactttaaaaccccccattaaaaaaaaaangntataaatcttgggtcttaanaangaagcctgggttctnttancccattttncccccgggaaggnaaatnttcttaggnaanggaagggaagg

SEQ ID NO: 658 - DNA, 698 bp, Homo sapien
  misc_feature (1)...(698): n = A,T,C or G
ctggactccccgcggtggcggccgctctagaactagtggatccgtgttggctcaattctcaaggctgttgctgtgcggcctgttccccacacgtgctgctcagctcaggcaagcaccgagcttgtgttgtttcatgctcagcgtggaggcccctcctccaggtcgctgctctgtggggttcccatacactcaggctcctaggaggagtccatttagaaagccagggtttttctcagagtcttagttccttgtgctgtcatccatttcacacgacttgggccctgctcggggcaacacagcaagagaaaagacagggaaaataagagagggaccttgcacacacacgctctggaccacagagccctgtgcccagctcctctgtcaatacaggtggaatctcgtgcaggatcgcaggggtctgtgatgccaccaaagagcaggccgggacagggttaggagagaaaggagagggaagtgggggtttctcctacgcactcttatttgcagagggaaaggcgggtttgtattggggttgtcggtctttgcacccacngcacagttgtgagacacccccatcctnagatcaaagccccacatacagcttggggaaaaacaaaacnaaacaaaacaaaaacagtaaacctccatgccanttgttgggnaagttttnaatttncttccccnacccancttgcttc

SEQ ID NO: 659 - DNA, 750 bp, Homo sapien
  misc_feature (1)...(750): n = A,T,C or G
ncaanctggnctccaccgcggtggcggccgctctagactagtggatcctcctcatgggcctggatatctctgaacatatgatgaacattgcttatgaaaaattatttgtangaaaattgtgaggcctaagaatgntattttcttttagtgatggtctttgtttgcttctgtaaggnacttgtgggcactcgtaagcttggatctctttaatctaataccagntttgagattttcttggccccatagatgaattaaaactggcgtacttcttgtttacaaganggataagtctcctagggtaagtcttttggggtcccaagtcaaaaagatgagggatttaccagttctctaaccttggtagccccagactccaaactttgccttctagtcccaagaggctatcaaaaagcaaaggccatcttccaccttcttttccanaacagcacacattccagacagtacttgaaagcaggaacctccttatcccttaaaaacctcttggaancatcttccctctcttgcttctactatgcttggcccacctancattcncntttttctggaaaccggaaaaancttntgacttnngttggctacattcagcttggccccctacaatntggtttccatctgccctaangaaattttaaagggcactttttttntggcccctgactttcnntttttagggctttcccccangctttgcccctttggttaaaggggttattttccttccccttttggaag

SEQ ID NO: 660 - DNA, 849 bp, Homo sapien
  misc_feature (1)...(849): n = A,T,C or G
tcggatccactagtccagtgtggtggaattcgcggcccgcgtcgacgggcagtagtggtatgcntntctaaatgttataattatttcagaattactctgccagaaagttatgatcatacatagaagagtttgtagctaactttgaaagtagtggaaagtggttttcatgtattgtttgggttaatttaattttgattatatttggtttttagttcaggtaatttttttgttgaaaacttcaaatgacaatttcttcatggttactaaagatcactcatgtggagtagtttcagatttttttctgaatacatgtattacttttagagatgtaaagatgtgaaattactaagagagaaacccatgtgatttgtttagtggatcaaaagtcggtagctcctttgatcctaagtgccactgatagttaaatagatactgaagctatgggcaggctggattgataagaaaaaaggagacagagaaatgggaaattgggaaagaactgtgcaaataggaaaaggagagagcaacagaacagaattagtaccacagtgccgaagtgccacctcaggtacttccatctcccatctcctgaagaattcagtaacagtttgcaaatggtcaacacaatcatttagtgatcctggttgatattttcaatactttctggggatttcttggctggnttcaaaagatgatgctgatagttttattgcccctgaaggtattctgaagnttancataatttattggtcagtaaaatatttgaataaaagnggangaaggaaaatctggcntcttattttgggatntcngcngggggaangaggatataattnaccccggccttgg

SEQ ID NO: 661 - DNA, 653 bp, Homo sapien
  misc_feature (1)...(653): n = A,T,C or G
aacttaagcttggtaccgagctcggatccctagtccagtgtggtggaattcgcggccgcgtcgacctccattcgtttcttgtccttttttttcattttttctcatgttctattcactttaggtttctaagataaatattataaaataatttttacttataaattattcactgataccctgtctttaacatgtgaaatgaattcaaaaggaatcttaatgagaaataatatactcatgatgtttaatagatttgatttcgaaataataagccctctgaagtcctaagttaaaaataaagcaacttgtttgataatttttcatcaagaatgtatctgagtctctgagtaattattagtaggaatattccattatcacaattacacagtataagctatttagtctaactttaccaaaaaagggagctacttcaacactgtgtgagacttttaatgggtttgcattgggtatgcactattagcaagataacctattttacagcagtgtttnttaacctttcccatttatttgaaaggcagctaagatatagtagttaatntaangggctgatgcatttatattacatgtaganaatgggagatacnaaagggagngggggganatnttttgnattcnnaagcttcnttgncaattaa

SEQ ID NO: 662 - DNA, 646 bp, Homo sapien
  misc_feature (1)...(646): n = A,T,C or G
aaacttaagcttggtacccgagctcggatccctagtccagtgtggtggaattcgcggccgcgtcgacccagggacaggcagccagngctggggtcaccagggtcccctcttgggccctccaanagcaacagtactggcaacagctgggatttgctgagcacagactctgcagcaggctcggttgagctctctgtgcctgttccttcataccatcctcacgcccatccatgagatgggtccagctgttttcagatgagaaaatggcacaggaagctggtaagtgacagtcagaaatgaatgctggcagcttantccttggacccaccgcagtgcaggaccttgctcaacagggatcacccttgtccgccacctgttcatgaggccacccagggtttgtgtggtcatttgtctcctttcatctgcttgccttcaaccagctgggtcattagggctggggaacccagaccccacacagtccttctcccagangccagacacannctncgccacagnaaggacttcagtccccgaancaaatgtncctgggcgtanaaactgnagggnccccaatccctggtggggtactgctttgcactggnggaattcacccctcattgnnaacctttccctnttnncacccctaaac

SEQ ID NO: 663 - DNA, 650 bp, Homo sapien
  misc_feature (1)...(650): n = A,T,C or G
aacttaagcttggtacccgagctcggatccctagtccagtgtggtggaattcgcggccgcgtcgacgtcgacgcggcgngccgtttcgacgcagttgatacatattattatatactacatnggttttctagaattaaaaaattaatgtgtagtgccagccctagatgtaagttacatatatcaactctatccaattttgtcagccataaaacttacctttttcacatacttctaactctaacaatgtgagaaatgtagatcattgcaattatacccacaaggcagatggctacatgcagaatggatagcagaatctagctacttacgctagccacatggtagacgttttttcctttgtttttgcaaaattgcaatataagttgcatatcgttagagtgaaaagatgtaaagaacccatagaagccagtgatgaaggacatttatattttcacctttacaaangaccttaaaattgcctatgtggagcagaaactggaggagggcnaanccatcngtaaaaaaaattttgntnctatttggatttgggcaccattattacctccccaggtncctttttgntttaacctttcttttaaaaaaaataattcntaatttttgggcaaaaaaaaacaaggtttttatttaaattt

SEQ ID NO: 664 - DNA, 678 bp, Homo sapien; identical to SEQ ID NO: 605
  misc_feature (1)...(678): n = A,T,C or G

SEQ ID NO: 665 - DNA, 694 bp, Homo sapien; identical to SEQ ID NO: 604
  misc_feature (1)...(694): n = A,T,C or G

SEQ ID NO: 666 - DNA, 705 bp, Homo sapien
  misc_feature (1)...(705): n = A,T,C or G
tttaaaaatttagatacactangaaaattattttagtatcagaagaatatcagggggtgtagtactcatcagagctaaatgagagcgctttaaaaatgttagtttgtcttccgccatttctacagaaagctgcaatttcaggttttcaacctaataggtgatatttaagaaaaaaaaaaagcaatcgcaaatagccccactgcttttacaaatcattttttctcttctaggtatagcctgtcaggtggcctaatgtaatttttgacatctctaggaattttaatagaaccagaaatgggtgccagagatatgcctgcactaatcttaagtggggatttatgtatttctcaagcaagtgattaaagcaaaactaggcacgattgaaatcaagatcttttaggcaagaaagtcatgatgagttttanaattattttaggactctgtggctttctcttcatagaaatagaaaaaaaaattgtataaaaccacaaaaggtcctgaatagcccaagcaacactgaacaaaaagaacaaagcaggaagcaacacactaccagaattcaaattatactaccaaggtgtagtaaccaaaacagcattctattgggcntaaaatagaccnaagaccaatggaacagaataaagaacccaaaataaatccatatttttacagccagctnattatcaataaaaacnccaagaacnt

SEQ ID NO: 667 - DNA, 817 bp, Homo sapien; identical to SEQ ID NO: 603
  misc_feature (1)...(817): n = A,T,C or G

SEQ ID NO: 668 - DNA, 826 bp, Homo sapien; identical to SEQ ID NO: 602
  misc_feature (1)...(826): n = A,T,C or G

SEQ ID NO: 669 - DNA, 547 bp, Homo sapien; identical to SEQ ID NO: 601
  misc_feature (1)...(547): n = A,T,C or G

SEQ ID NO: 670 - DNA, 232 bp, Homo sapien; identical to SEQ ID NO: 600
  misc_feature (1)...(232): n = A,T,C or G

SEQ ID NO: 671 - DNA, 214 bp, Homo sapien
  misc_feature (1)...(214): n = A,T,C or G
ctccccttccntccttcgctactncncattttcnnaaatttntttcgcntatgnggaaaaacacccacattnttcanctcgcacagaacangnnggggtgtgtaaaatgaagggcttccncnctttctcttattnaanaacactnaaanagggangggctaaaacccgcgngatntctacnctatcgcgggcgcttttggngttggctagaaga

SEQ ID NO: 672 - DNA, 328 bp, Homo sapien
  misc_feature (1)...(328): n = A,T,C or G
ngancagcggngtttaaacgggcctctagactcgaggagacncctgttggatggtggatcacanntcgntactactatacaggacagagtatcggganctcttggntgttggngcctgccaaccactgctnctgttaactgcgtatctgaagggactcggactggcttcagaagaactaccggctcgaatgnaccatggatgattcncnctagttgaaaaaaaactcaggcacatgtattgccactgatgactagcgccagactnctctcggctctntaacgagcccacatgncngtgtgncncccgtgctgnctccagaagaggttc

SEQ ID NO: 673 - DNA, 223 bp, Homo sapien
  misc_feature (1)...(223): n = A,T,C or G
gggggcaaagctggctagcgtttaaacttaagcttggtaccgagctcggatcccnnagacattgtgcatgaaaatgcaaattgagtgtggtctatantgccatcntcacctnctgncngctcaaaacaacngctttctgctgcaatgggtagggctcctnacncacggtcgcnnacggaggccnncttatcctcntcggtnnggatccctngaagcatnttct

SEQ ID NO: 674 - DNA, 256 bp, Homo sapien
  misc_feature (1)...(256): n = A,T,C or G
gnggggtcntngatgagcgcgcgtaatacnatcactntcnggcgngntgggtaccgggccccccctcnaagcggccgccctttttttnttttttttcatnacatgataanntctttnttctaaacagaccacaccactanagttcctttnctttngtacggaattgagttaaagtagagnatacaatgcagggcttcnnctctatttcacattccaggntggttcngnatggatcggccctgcctctccgatgggt

SEQ ID NO: 675 - DNA, 439 bp, Homo sapien
  misc_feature (1)...(439): n = A,T,C or G
nnactagtccagtgtggtggaattccattgtgttgggcttgtatgggtttttttgtctagttntttgggaaatgttngtgttactatnttttggatatnatatatgatatgtatggcccttctatgggctcctcanacngaactcaaccattttccacaaaaccnattcctcctttcccttcatgactgagtggtgttggtactatccnggaaactgggacattgtccttcacatctntcccttanctgcctngtccnattgatgtctttgagctntganatgtctttgttaactntctcctncntctgtactgccggcanaattaagcaccatntgtcacaaaaagtattgcgttaccttcacgnatctgttngttnccatncttgctgcttctccngnggaaaataggctnttctggcaaccgaacngaanaaatac

SEQ ID NO: 676 - DNA, 587 bp, Homo sapien
  misc_feature (1)...(587): n = A,T,C or G
nggnggcctnattaagcgcgcgtaatacnactcactntggggcgaattgggtaccgggnccccctcaagttnatntgccnaacctctcttttggaataacaaaaggtttaacacatatgtcctcatagggacgcgctttcacacnttcctgacngcttcatanacntcattnctatttctcctcagnacaagttnaggcngaaggtgaggcanacnttataatttccatttcacaaatncggaaagtgaggctcaaagggnttaaaaaataacctgatacaantcatagagccggtntctggaanaagcaggagcaaagtccaggcatcctgatccaagctnggtccactgccttccactctggagaggcttcatctccgacaaaggaagggacntgagtggctgganaatctcatgggataaagacctcagnatttcatgctcctggaaatcccatgggttgaacaacaggtntttggcccgtggttctntccctttgnccatcttttaaccttggggtaaatgatggcntctntnagcnttttttttnaaagagatngaaattgaatgattattngctcattggg

SEQ ID NO: 677 - DNA, 444 bp, Homo sapien
  misc_feature (1)...(444): n = A,T,C or G
gtggggcatnattaagcgcgcgtaatacgactcactataggggcgaantgggtaccgggcccccctcgaagcggccgccctttttttttttttttactgtccaaactntctatngatntagttgaactgtncaacgatttcatgaaattctatacacanagccttcaggtccagagagtaaaacaaatttaaatttnttcaccanattgnagcagncanaagcatccnatnatatccgactacaatgaatnatatgctnanggtanctnatttacccactntggggtctttanggtctgtcacaaactattttcgtaaacatcnntttaaanttnggtgaatggacctaatnccagataantctatttnatntaccctagcatncctgtggctnactttncgggctgtgttggcntacttttaggagaaaattggtataaatnn

SEQ ID NO: 678 - DNA, 670 bp, Homo sapien
  misc_feature (1)...(670): n = A,T,C or G
actagtccagtgtggtggaattccattgtgttgggagcagtttaaaaaaaaaaaagacnaaatatacnactcttgatnaaacataaaggtacagtggtctatgaggaanagaaaaggtacctnaggatgcaaaantacctaccacatgggaaccgttngtccacactcattccnnanaaaaccgagtcctctcanttncacacgtgtacgtttcagttgggaagtgcttgccattactccnaagcctagaaccttcacgtcctgaaggttctggaaggtttttcagattgcttaaganacgcngcccttccatattcntctccactacccnggggaacggaacaaatggagctgcgacngggaagcgtcccttcccntccgaacgctttctttcaaacctgcctgccttccnggcgaatggaccggaaggtttnctngcttcctttcancccnaattacttcctgngttgaaaattggcctgttggtttgcaaatgcnggaatttgtttactttcntcatgtcctgtgttgnncnaaccggctcncttgttgcctccctttngaaaggttttcatcaggccccgccctttctcttntaanngtcctaatccggncnggaccactcggggaaaattttttcttttcgaaaagccgccccntccgtccggct

SEQ ID NO: 679 - DNA, 449 bp, Homo sapien
  misc_feature (1)...(449): n = A,T,C or G
actagtccagtgtggtggaattccattgtgttgggagtaggtctactacancctacttcccctatcatanaagancttancaacnttcatgatccccccctcntannccttttcctcanctgcntcctagtcctgtttgtcctnttcctaacantcntaaganagatnactaatnctactatctctnacctccggaanctacaanacgtctggaactattcngaccccatgcanccncatnctccatcgtcctcccagcccctncccttcctttacnttactnaacgaaggtcgacgatccctcccntacctcccnnnccattgggncccaanggnactggacctcacgantacaccnactacggggngactaagnctgnaactccttacatatntccccgttacccccngaacncagcgaacngcnacaccttggacntcaagaanta

SEQ ID NO: 680 - DNA, 670 bp, Homo sapien
  misc_feature (1)...(670): n = A,T,C or G
tttcngtgtggtggaattcgcggccgcgtcgacgagaaganggaggagganaaggagaaggagaagaaggagaanaaggaggagaaggagaagaaggagaagaaatcatcatcatcatcatccactgtctngcaactatttaagtttgcnantcccttgaaaacaggtacttttgtttcaatgtttgggaccactnctgacnatgannagaanaccaataaatgcttgatnaatgaaaaanccactttttacctgttagaaccctgaggctaagagaantgatgtgactcgacttagttaccacaaactatgatcctagcatnaattggggcatctcaacacctcaactccctgtgcaagaacagattttcaatgtctactgatgattttaaatggattanttcctctctttacttcttaagggcatgaagntttatgaaacaaaactatncagttccagacgcttaacccacatagtgttaatagtcaccttcaacacacnactaaacccccaaaaaangntttttacggngtttcgacagttttcttttctttttgacttgnttaacacccnngacaactttgtnctntttccntgaatcacanctttcnaananccaatggtncggttttttctcnttcngggcccttcccttnttnaaaaccanat

SEQ ID NO: 681 - DNA, 494 bp, Homo sapien
  misc_feature (1)...(494): n = A,T,C or G
tcatggtgtccacagtctgatgtgagcgcattaaatttaaggatctccgcccttctccttaaaactcaggacttggcaatgancctaggaagcgcccctcccctccccanccanatccaagccccggaccgctgcgnctccagctgcgcctagtgaaaccgccgaattcgaattcacactcggngggccggcgaaggtgtgcgcgcccgcgggagcgccggggcnagcccgagggactgcaagccaanaanggaggcatgggtggcggggggcgccgtctgatccaggaaggagcggaggcgccgatcacacactcttnagacgccctgcccgcgcctggccagcgcgcagnctgcaggacgcgcggagcaggaactcgctggagtttgccaagccccangnctctggaaagtntgtagctccctttcggancgnctcttctggccctttgggacgggtgtgtcattgggcgggggtctgtataagggggggac

SEQ ID NO: 682 - DNA, 263 bp, Homo sapien
  misc_feature (1)...(263): n = A,T,C or G
tgatcattcaagcgntgngcgnataacgattgctnagcccaacctttcatagggtcgttcctttgggaatnggatgtctattgaatggcagggataggggcactcggcattcgcctctggtacagttttgcatatatatcctcatcgcgagcgagcgtaggggancgttaagtttggggaaatgccnccgcatgnccctnccggagcttaaacccccaacaatncccattttnaaaaaagntttnttanttaaaaaaaaaaac

SEQ ID NO: 683 - DNA, 255 bp, Homo sapien
  misc_feature (1)...(255): n = A,T,C or G
cttgcccggcatgcacagacntntttacggacacnctactccaagngagcctgnanctgtctacggtcaanctctaaggttngncantgccacanatggcatagtcccgagggcggtnantctggantgctctctgcacttgaacntaaagcgcntttcaaganaggnctaatngcctgcctcttgacaacnaacaancccacaccnacctangaccctntangcaaggactggattctgnaaatgcaatacaca

SEQ ID NO: 684 - DNA, 922 bp, Homo sapien
  misc_feature (1)...(922): n = A,T,C or G
acccttcatttcatgtgcttctattttcctacatcttttacatgactaagggattaatgaaatcacctcttcataatcatgaccataatttcatccaacaagtactcaagtttggtgttagcactttattaatgcttacgaattctctctctctccctctttctcttttccttagtccttgcacaataaggatttttgaatgtataatatcatcttaggtaagctttcatatggttttggcatatgaagcttatgactgtcataagccataccaagcctgtggagtatggcatgattttcattacataatccaatgaaaatagacttattttaaatccctaactttgtagttttaatttgtatttcactatcttgaaattaacagctagtacttatccatcacagcagtctcctactgacatgaagcaagttgttgaatgcagtagancatgaatgaaagcatttaatgttanacaaaaatgggtgatacccaagcattctgaattatttgcatcaaggaatgggacatgtacattagtggcatcatttctaccaatatgtgacttgaattgtttttttaaaaaaagganaatgantttctcaatttgctttaaaaaattttnaaaaagttcaatggcatgctgctttgtctggacttaatttattaacaattnttaanccttccttaaggacanaattttggtgttcaggatcnccctgaagggtcttatttttnatannattccaaacccaaaaggtggtttaaaatgggngggttccccccncnaaaatttggaccggcttttttatatttaaaaaanttnccntttgngtttgaaanctnaataccaattaagggggaattttacctnccagtgggaaaaaaaaacnctngccnttnaaaaaattcccnggagncaat

SEQ ID NO: 685 - DNA, 531 bp, Homo sapien
  misc_feature (1)...(531): n = A,T,C or G
tgaggctctgtaaaactgttcctctgctaggcatacttcatattctctatattaaactcatctttaattggcatggaagattcattgttccaaatctcagatgaagatcctatattggatgcaattaagcctggcagcgccctcaaaagacagtcttgtcactgctagccacagccaggacacagtaacagttccttctagtgacccnagaccataanaaatananatctaaagaattctgactccaaaggcattagcccattcctggtattgccaattatgatagaaaaaattgccaagctcctgggacatggaaatacactcagtacatttgagaactggagaactantttccaaaatagtatgaagacatganggtgattgtagatatntgagtttggagaanttgagggaaatcngattacacatgtttactacaagagatgttnataagtaaagaaggcctgatatacaatctaacagacnantgagataaatcttaantcacaactgacntcccttttggggcgg

SEQ ID NO: 686 - DNA, 336 bp, Homo sapien
  misc_feature (1)...(336): n = A,T,C or G
ggngncctnatgagcgcgcgtaatacgatcatatagggcgaattgggtaccgggcccccctcaagaacactacaagctatgtcctcttctcanagagccctgaanttttaacatattgaaagctctnatcttgccaaanaactccacttaacttcaaaacacaccctccacacacatcatgatcaactnagatcttactgaaccagaatcctnaatggcatacttcaggaacaggggtccanagaagcagttctcaaantgcagctnaaaaagaaactgaaaacccaattcatgcaanacctagggcttatttgagagcattttccagtgcagatt

SEQ ID NO: 687 - DNA, 271 bp, Homo sapien
  misc_feature (1)...(271): n = A,T,C or G
aatctgcactggaaaatgctctaaaataagccctaggtcttgcatgaattgggttttcagtttctttttaagctgcactttgagaactgcttctctggacccctgttcctgaagtatgccatttaggattctggttcagtaagatctcagttaatcatgatgtgtgtggagggtgtgttttgaagttnagtggagttctttggcaagatcagagctttcaatatgttnaaacttcagggctctctgagaagaggacatagcttgtagtgtt

SEQ ID NO: 688 - DNA, 740 bp, Homo sapien
  misc_feature (1)...(740): n = A,T,C or G
tgatgaagcgcgcgtnntacnactcactatnggggcgaantatgggtaccgggnccccctcgaagcggccgccctttttttntttttttgtgagagtttaaataaaatatttgagtttaatttaaagtttgagtttaattaaaatatatggcatatcccaagttgggctttgcanaaagaacacttctcaggaactgttagttggtgtaccaggaactcagaagggtcctgttattaaatatatttggaaaatgcatggattctctgaanatcnctctgcatgtgagcaacacttacatcncaaaccaaaattggcattgcatacatnaaccaatatttcccaaacatttctggttatggcccaccccctttgtgtantacttattgctgttttttggaaccctggggaaattacttaaaatattcagctggaaattacaggcgttacttttaagggancaagaattacagtgactcccaaaattgcaagtgttgattactatttaagaacccaagaatttgaaagaaattttgaaaagtgaaaacnggaaatnttaaatgacttctcaaattttgaaaactcnggnaaacatctccactttggtncccttcctttaaaaattggctaaaaattntttnttatncccaccccattggaantnccccccccctggaacaattggattcccctatttcctaaaaaacggccnccccccccggggngaacnccnacnttttgn

SEQ ID NO: 689 - DNA, 635 bp, Homo sapien
  misc_feature (1)...(635): n = A,T,C or G
actagtccagtgtggtggaattccattgtgttgggattacatatacttttagcaatttttaaagaagtgtacaaagttgagatgtttcctgagctctcatatatctganaatgtcattttacatctccgtcttcacctctcaaaacttctttcaattctttggctcttaatagtaatcaacacttgcactctggagtcactgtaattcttgctcctttacagctacncctgttatttccagctgaatatttttagttatttcccagggttccaaaaaacagcaataagtactacacaaagggggtgggccataaccagaaatgtttgggaaatactggctcatgtatgcaatgccaaatctggtttgcnattgtantgttgctcacatgcagagtgaatcttcaaanaatccatgcattttccaaatatatttaataacagggaaccttctganttcctggntacaccaactaacagttcctgaaaaatgttctttctgcaaaacccaacttggggatatgccatatattttaattaaactcaaactttaaattaaactncaattattttattttaaactcctcaaaaaaaaaaaaaaaaagggggggcccttccaanggggggnccggttcccc

SEQ ID NO: 690 - DNA, 3923 bp, Homo sapien
acagaagaaatagcaagtgccgagaagctggcatcagaaaaacagaggggagatttgtgtggctgcagccgagggagaccaggaagatctgcatggtgggaaggacctgatgatacagaggaattacaacacatatacttagtgtttcaatgaacaccaagataaataagtgaagagctagtccgctgtgagtctcctcagtgacacagggctggatcaccatcgacggcactttctgagtactcagtgcagcaaagaaagactacagacatctcaatggcaggggtgagaaataagaaaggctgctgactttaccatctgaggccacacatctgctgaaatggagataattaacatcactagaaacagcaagatgacaatataatgtctaagtagtgacatgtttttgcacatttccagcccctttaaatatccacacacacaggaagcacaaaaggaagcacagagatccctgggagaaatgcccggccgccatcttgggtcatcgatgagcctcgccctgtgcctggtcccgcttgtgagggaaggacattagaaaatgaattgatgtgttccttaaaggatgggcaggaaaacagatcctgttgtggatatttatttgaacgggattacagatttgaaatgaagtcacaaagtgagcattaccaatgagaggaaaacagacgagaaaatcttgatggcttcacaagacatgcaacaaacaaaatggaatactgtgatgacatgaggcagccaagctggggaggagataaccacggggcagagggtcaggattctggccctgctgcctaaactgtgcgttcataaccaaatcatttcatatttctaaccctcaaaacaaagctgttgtaatatctgatctctacggttccttctgggcccaacattctccatatatccagccacactcatttttaatatttagttcccagatctgtactgtgacctttctacactgtagaataacattactcattttgttcaaagacccttcgtgttgctgcctaatatgtagctgactgtttttcctaaggagtgttctggcccaggggatctgtgaacaggctgggaagcatctcaagatctttccagggttatacttactagcacacagcatgatcattacggagtgaattatctaatcaacatcatcctcagtgtctttgcccatactgaaattcatttcccacttttgtgcccattctcaagacctcaaaatgtcattccattaatatcacaggattaacttttttttttaacctggaagaattcaatgttacatgcagctatgggaatttaattacatattttgttttccagtgcaaagatgactaagtcctttatccctcccctttgtttgattttttttccagtataaagttaaaatgcttagccttgtactgaggctgtatacagcacagcctctccccatccctccagccttatctgtcatcaccatcaacccctcccataccacctaaacaaaatctaacttgtaattccttgaacatgtcaggacatacattattccttctgcctgagaagctcttccttgtctcttaaatctagaatgatgtaaagttttgaataagttgactatcttacttcatgcaaagaagggacacatatgagattcatcatcacatgagacagcaaatactaaaagtgtaatttgattataagagtttagataaatatatgaaatgcaagagccacagagggaatgtttatggggcacgtttgtaagcctgggatgtgaagcaaaggcagggaacctcatagtatcttatataatatacttcatttctctatctctatcacaatatccaacaagcttttcacagaattcatgcagtgcaaatccccaaaggtaacctttatccatttcatggtgagtgcgctttagaattttggcaaatcatactggtcacttatctcaactttgagatgtgtttgtccttgtagttaattgaaagaaatagggcactcttgtgagccactttagggttcactcctggcaataaagaatttacaaagagctactcaggaccagttgttaagagctctgtgtgtgtgtgtgtgtgtgtgtgagtgtacatgccaaagtgtgcctctctctcttgacccattatttcagacttaaaacaagcatgttttcaaatggcactatgagctgccaatgatgtatcaccaccatatctcattattctccagtaaatgtgataataatgtcatctgttaacataaaaaaagtttgacttcacaaaagcagctggaaatggacaaccacaatatgcataaatctaactcctaccatcagctacacactgcttgacatatattgttagaagcacctcgcatttgtgggttctcttaagcaaaatacttgcattaggtctcagctggggctgtgcatcaggcggtttgagaaatattcaattctcagcagaagccagaatttgaattccctcatcttttaggaatcatttaccaggtttggagaggattcagacagctcaggtgctttcactaatgtctctgaacttctgtccctctttgtgttcatggatagtccaataaataatgttatctttgaactgatgctcataggagagaatataagaactctgagtgatatcaacattagggattcaaagaaatattagatttaagctcacactggtcaaaaggaaccaagatacaaagaactctgagctgtcatcgtccccatctctgtgagccacaaccaacagcaggacccaacgcatgtctgagatccttaaatcaaggaaaccagtgtcatgagttgaattctcctattatggatgctagcttctggccatctctggctctcctcttgacacatattagcttctagcctttgcttccacgacttttatcttttctccaacacatcgcttaccaatcctctctctgctctgttgctttggacttccccacaagaatttcaacgactctcaagtcttttcttccatccccaccactaacctgaatgcctagacccttatttttattaatttccaatagatgctgcctatgggctatattgctttagatgaacattagatatttaaagctcaagaggttcaaaatccaactcattatcttctctttctttcacctccctgctcctctccctatattactgattgcactgaacagcatggtccccaatgtagccatgcaaatgagaaacccagtggctccttgtggtacatgcatgcaagactgctgaagccagaaggatgactgattacgcctcatgggtggaggggaccactcctgggccttcgtgattgtcaggagcaagacctgagatgctccctgccttcagtgtcctctgcatctcccctttctaatgaagatccatagaatttgctacatttgagaattccaattaggaactcacatgttttatctgccctatcaattttttaaacttgctgaaaattaagttttttcaaaatctgtccttgtaaattactttttcttacagtgtcttggcatactatatcaactttgattctttgttacaacttttcttactcttttatcaccaaagtggcttttattctctttattattattattttcttttactactatattacgttgttattattttgttctctatagtatcaatttatttgatttagtttcaatttatttttattgctgacttttaaaataagtgattcggggggtgggagaacaggggagggagagcattaggacaaatacctaatgcatgtgggacttaaaacctagatgatgggttgataggtgcagcaaaccactatggcacacgtatacctgtgtaacaaacctacacattctgcacatgtatcccagaacgtaaagtaaaatttaaaaaaaagtga

SEQ ID NO: 691 - DNA, 882 bp, Homo sapien
  misc_feature (1)...(882): n = A,T,C or G
ttactcactatagggctcgagcggccgctgaattctgctgcagtgagctgtgattatgtccctgcactccagcctggatgacagaacacgatcatttctctaaagacaaacaaaaaacataaaataaaactagtataaggatagaagcccagggttgatttaagtctgcggaaatcataaaccataggtcagacttctcattgatgaggtacttgtgggttagaatacaattaggtatatttggtctagaaaccaggatggaattagagaataaaagactgagcaatagcatgttatagtattagaaatactatagaaataggaaaagccctgattatgactttggagttctgatccaacatctgggattatttagatattttaaaggaaaacgatgacttttagctctcaggatgttagtttcctcaaccataaaatgaagagcctcgaaaagatttcgtttaccagattatttctgaagtcaattccagttctaaaattccatcactgngcactaaggcaaattgaattgaataaagtattgggnatgcataaaatactctatttttaaaaangaatagtaattatccattggnaacagacgcantcatccagncatctcctaccctgncccatgncntatgtaganatgtanctctaatcccttaacaaaccgattttgcaaaggagcttanccttggggtacttggtcanggcaactggtctactttnaagactcatcttcacttactgggcaccaaatncctaccattgcatcaaactggggttcccatncaaggcaaaccctgngaaatctttaatcccgaaattggcgcccaattttgnggggtttccnaaaagaatcntcccccccgaggggcc

SEQ ID NO: 692 - DNA, 235 bp, Homo sapien
  misc_feature (1)...(235): n = A,T,C or G
ccgcactngtaangnccgccagngngctgnaantccgctnagcncggatccactagtccattgatggtaaaagggtagcttactggnatgtccgnctgctccanganataatacncaggacttctcanagcacttaatatgttaatataaaactncgngaaaaaagatnttcnatgaancnttcctcttaggaggtcaggngagaatagtgttaatgncattaagganagaacga

SEQ ID NO: 693 - DNA, 383 bp, Homo sapien
  misc_feature (1)...(383): n = A,T,C or G
nttatgtaagaaatgtcatatatcttttattttctttaaatcaaaataaatatgactttgagcatcccatcccatgccccatcctatcagaatggtaggaacatcaacacaaataattagtaatgcaccgcatctacattcccatgctctctttacttcttcagcattgcctaaaggcataatacacctttaattaattaattcagcctcctaatgcacattaacaaagcccctgctagactctgtccataatggnaaacctgnatgatccttgatattaacantttaaggaatgctcatggattggttncagacttaaaaaattgagggggctgaanaaaatctaangganaaatcatggaagcatttgcacatattacata

SEQ ID NO: 694 - DNA, 204 bp, Homo sapien
tctcttggctggtcagcctgaagggtggtaatgactcaccaacgctactaatccttcttcactgtcccttatttttttccctcccaggctcataactcgaggttaaactctcttttatacaagaaccctgtctgatgaagcatcatttcagaattttaagtcaacttacaaatgtggtattattcacatctgagtacaaattta

SEQ ID NO: 695 - DNA, 670 bp, Homo sapien
  misc_feature (1)...(670): n = A,T,C or G
gcaccagcccaggtgctgtttcttcacttgagctccatgaccctccctgtgtggtgggttgaacggtgacctccaaaagatatgtccacctggaacctcagaataagatcttatttggaatagtctttgtagatgtcagtaaggtaaagatttggagatgagaccctcctggattagggtaggccctaggtccactggcaggtgtgcttctcagggtctgaaaggggaagacagggccacccagaggaggagacggaggcagagacagggccacccagaggaggagacggaggcagagacagggccacccagaggaggagacggaggcagagacaggggccacccanaggaggagacggaggcagagacagggccacccagaggaggagacggaggcagagacagggccacccaaaggaggagacggaggcagaanacaggcccccccaaagaaganaccggaggcanaaaacagggccacccanaggaggagacggaggcanaaacagggccaccccaaaggaggagacggaggcaaaacagggccacccaaaaggaggaagccggaaggaaaaaacagggcccccccaaaggaggaagncggagggcnaaaaanagggccccccccaaagngagaaaaccnggnaggcnanaaaaccnggggcccnnc

SEQ ID NO: 696 - DNA, 317 bp, Homo sapien
  misc_feature (1)...(317): n = A,T,C or G
tgacccgttntttctgcaaaggagagtggggaaggagggntgggaagacaaaagttacatgttagcagggaagagaacagaattttatccacccttatctctttagtgagtgaacaaacagcccactgtcatcgtggatacatttcacttttttcacatgactaaggagctctccggagtgaagagtgagtaaatatgtttattacgcattcatttgctaagaatcatcaagaacccaaagttagagacgtttcgtggttgaactttctccctactgtctagtagaattatatggggattctggatctgctggtgcc

SEQ ID NO: 697 - DNA, 246 bp, Homo sapien
  misc_feature (1)...(246): n = A,T,C or G
ctncagctctaatcgactnctatnaggnatgatggcncgtgcngcgcgtacgtantgcttggatcctcnnanagcggacgcctactactactaaattcgcggncgcgttgactttttttgtttttttccttnacagagntntttttgtgcccttggttcttatgctcanactcngcaaaaaanatcaaaagntacnnatgaaaaacntatnccatctncanaaaggaggtgnagntattactttct

SEQ ID NO: 698 - DNA, 3674 bp, Homo sapien
agaaagtttccttttttttttttaatggtgaaaagatatacacatatttagaattagccagctgggctcagtttagattattccaattttgttggcaacatccagagcatcgtaatcaggagccagtgaaacatattccttcttctctccatcaggccaaatcacggtgttgaccttggccacatcaatgtcttagaacttcttcacagcctgtttgatctggtgcttgttggctttaacatccacaatgaacacaagtgtgttgttgtcttctatcttcttcgtggtgactcagtggtcagcggaaacttgatgatagcgtagtggtcaagcttgtatctcctgggagcgctcttccaaagatatttgggctgcctcgggagttgcagcgtcttgggccgccggaaggtgggtgacgtacggatcttctttttttgtgtggctgtggacacctttcaacactgtcttcttggcctttaaatccttcgctttggtttcggctataggaggggcaggagcttccttcttcactttcggcgccatcttgtgaaaagggaaagtttcctttctaataccattttcacttctcccgaattttgtggatcgtttcttggtatctaccccagatttcaggagtgttggctggatcttagggattgtgaagtcttcatttccctgtggtgagatctgaggcatgattttaaacagtgtgagggaaggagatctccaggcactttaatagaatggagaagcaggatgggatttgagaggaaatctgattttgaaaaaaggagaactagagttgagttcgtaattaactagcaccttaaaggtcattcagcatgcccatctgcacagtgggtgtaatcaccctacagaacaaaaacaaaaaggcaatggagaggaagctgtaaagcactgtacatgtttaactcattgttatgtaagctagccgaaggcttcacagacttgaattcatctcccaagttctcttcctgtactggaaactctgccttaggttgcttaaaacttgagaaacagaatattgcttcccctgcctgccttcttgagtacacttgcctacacaaagatgcacatccttgtttgtgtgtgtgtgtccatttgctgtgacattcttgtgaaagtcaaagtttcccagctgttgacatacacaagtttgtttggtgcaacctgtcagatgcatcccttagacaggccctttgatactctgggaaagacattggacttacagtcggaacgaaaagaaagaaatgtgatatgtatagcgtgcagtgagttggagttttacctgtattgttttaatttcaacaagcctgaggactagccacaaatgtacccagtttacaaatgaggaaacaggtgcaaaaaggttgttacctgtcaaaggtcgtatgtggcagagccaagatttgagcccagttatgtctgatgaacttagcctatgctctttaaacttctgaatgctgaccattgaggatatctaaacttagatcaattgcattttccctccaagactatttacttatcaatacaataataccacctttaccaatctattgttttgatacgagactcaaatatgccagatatatgtaaaagcaacctacaagctctctaatcatgctcacctaaaagattcccgggatctaataggctcaaagaaacttcttctagaaatataaaagagaaaattggattatgcaaaaattcattattaatttttttcatccatcctttaattcagcaaacatttatctgttgttgactttatgcagtatggccttttaaggattgggggacaggtgaagaacggggtgccagaatgcatcctcctactaatgaggtcagtacacatttgcattttaaaatgccctgtccagctgggcatggtggatcatgcctgtaatctcaacattggaaggccaaggcaggaggattgcttcagcccaggagttcaagaccagcctgggcaacatagaaagaccccatctctcaatcaatcaatcaatgccctgtctttgaaaataaaactctttaagaaaggtttaatgggcagggtgtggtagctcatgcctataatacagcactttgggaggctgaggcaggaggatcactttagcccagaagttcaagaccagcctgggcaacaagtgacacctcatctcaattttttaataaaatgaatacatacataaggaaagataaaaagaaaagtttaatgaaagaatacagtataaaacaaatctcttggacctaaaagtatttttgttcaagccaaatattgtgaatcacctctctgtgttgaggatacagaatatctaagcccaggaaactgagcagaaagttcatgtactaactaatcaacccgaggcaaggcaaaaatgagactaactaatcaatccgaggcaaggggcaaattagacggaacctgactctggtctattaagcgacaactttccctctgttgtatttttcttttattcaatgtaaaaggataaaaactctctaaaactaaaaacaatgtttgtcaggagttacaaaccatgaccaactaattatggggaatcataaaatatgactgtatgagatcttgatggtttacaaagtgtacccactgttaatcactttaaacattaatgaacttaaaaatgaatttacggagattggaatgtttctttcctgttgtattagttggctcaggctgccataacaaaataccacagactgggaggcttaagtaacagaaattcatttctcacagttctgggggctggaagtccacgatcaaggtgcaggaaaggcaggcttcattctgaggcccctctcttggctcacatgtggccaccctcccactgcgtgctcacatgacctctttgtgctcctggaaagagggtgtgggggacagagggaaagagaaggagagggaactctctggtgtctcgtctttcaaggaccctaacctgggccactttggcccaggcactgtggggtggggggttgtggctgctctgctctgagtggccaagataaagcaacagaaaaatgtccaaagctgtgcagcaaagacaagccaccgaacagggatctgctcatcagtgtggggacctccaagtcggccaccctggaggcaagcccccamagagcccatgcaaggtggcagcagcagaagaagggaattgtccctgtccttggcacattcctcaccgacctggtgatgctggacactgcgatgaatggtaatgtggatgagaatatgatggactcccagaaaaggagacccagctgctcaggtggctgcaaatcattacagccttcatcctggggaggaactgggggcctggttctgggtcagagagcagcccagtgagggtgagagctacagcctgtcctgccagctggatccccagtcccggtcaaccagtaatcaaggctgagcagatcaggcttcccggagctggtcttgggaagccagccctggggtgagttggctcctgctgtggtactgagacaatattgtcataaattcaatgcgcccttgtatccctttttcttttttatctgtctacatctataatcactatgcatactagtctttgttagtgtttctattcmacttaatagagatatgttatacttaaaaaaaaaaaaaaaaa

SEQ ID NO: 699 - DNA, 2051 bp, Homo sapien
  misc_feature (1)...(2051): n = A,T,C or G
ggaccaggggctgaagtgaacccccagcacagcacagctgctctataaaaacgtggccagacttttttttttgaagcaagtccctgttcttgttcgtcctgactagtcccatcagggccctggatcccaagactcagcatccaaggtcccctccaggaatcctggcagctcagcatactttatcctgtttcatctgagagcaaaaatgtaaaattggatgcacagaaaagtgactcaaagtgcttaatgactagaagaaatctaggagcagcaagaagagcaggacaaacaggccaggcggtgtcaggagcccaggtctccagctgganggaacgtcaaccctgcagtgggagcaggggccctttgcacatcctaggcacagatggtaatgtagacaccacaggtaagctgggcttggtacctacccctccccggattcagaaagaaaccaaacaaggagctttgtgtggaatgaaacctcctttcctcccagaagcactgctgactgtttggtggttgccatttgtggcagtgagcccttgtttgttctgaggttgggctggtttctcctcttggccctgccctacagatcataaaggagaacagcaagacgtccccagcaaacatccacagatggccttggaaataagtcaccttcctcaccctgcaggaatgccagtgaacatattgctgacatcttggagctcagtacctcatagtgtaacggcgtcagtagatctgcctgtgctgggacttcctgtactacccattcctgaggggcgatgcttctgcagggcctgtgacttggtgcacaacttcagacaccatcatcttgcagcagcaccgcaccctcactagccagggtgttgatgacttcctcaaggccaaggccacattcaaggcttcggacttcattgatgcgcttgtgctgagcaaggtggcttctccgggatcttaattcaggaggtagaatggagcttgagatcaagtgtctgatcaagcctcagtgtatgggcgctgttcatcctctggtgctgaagcagccaagagacccaagtctgcctggctgcctcttaggatatgacagcagagccagtggcctctactagatcctgtacaacctcacaaaacacccagacatcgggagtgctgccagcctgtgatgcaagagtcctaatcctgaagacattgaatgacctgtcgttgtgctgtttttaccaaaaaggatcatgaggatcagagaggaaaagtcacttgcccaaagtcacacagctgaacagtggtggagttcaactttgaccgtgggctgtctggcccccaaggtgtatgcttgcttctctcccaagagactcctttcttatcaggctcaaatgaatgaaaggaggatgttaaagacaacgccattattgacgagatcactcccaagcggattggagattgtcccaatatttagacctatagcaaggccttgggagaaatggtggtgcagcaggagagcaggaacctaaccattgccatcctaaggccctccattgtgtggagcaacgtggcaccagcttttcctgggttgggttgataatctaaatggatgtagccgactcattattgcggtatgtatagggatgaagaagtaactgtaatgtagtggaggaatagtaagaaaattcttagtgctggcttagcttaattgatccaaaaacataaatgctactttactatcaattgaagcatattatttcaattattctggttataatatggaggcaggatgaaattgtttttattcttttagaatttttttttatcaggaaaacagaggtaaagtgctatcaattactatttaagagttctattttgaaaagtgagaattaaggatttttcttttctttttaaaaaaaacttttttaaaaattaaaaataaaagaagcaaaagtcttaggaaaatgaagcaagtagccctgccactctatgtacagtaataacaatatctgtcccagttattatgtacaatattataaaaaatgtcgcagacagtaaaaaaaaaaaaaaaa

SEQ ID NO: 700 - DNA, 2841 bp, Homo sapien
  misc_feature (1)...(2841): n = A,T,C or G
gcagagcacagcatagctgctttaccaaatcatggccagactgcttctgtaagcaggcccctgatcctgttccacctcactggacaggacctcccaactggggcctccagctacccccaccagcatcccttggccaatggaaatttgaaatgttcctgggacagagctcctggagagaggggcaggccaccacctttgctgtttgggtgactagccgttctggcctgcaggctttggagagcccaagctgacaaggggtagaagaggtgcctcagcacagcacagccacgctacgaaaacatggccagactcttgtttaagtcagtccccgaacacatttctagtcagtgggtgaagtctttcaaccagggtctctggctaccttgactgctgttctctggccgacagaggtctcaggcctccctgagtcagagctcccggggggaggaccagattgtcatctttgctgtttgggtgacccagccatttcagccttagggcttcagagtgtctgaggtagccaggggctgaagtgaacccccagcacagcacagctgctgtataaaaacgtggccagactttttctttaagcaagtccctgttcttattcctcctgactaggtaagacttctcaacttgcctccagccacatcttattggtgtgttcagattggcaacaggtttgtacctcagtggtacagagctcccagaggaaggggtaggctatcatcttccctggaaaatacgagtcaattagggacttgaggggacccccagcattccacagcagcccttcagaaaagtggccagactctgtacttgatgggcagatcctcctggcctgtgtctctagccagcccaccactggagctatcaagccagtagcaactcagcagttccttggacagagcttccaggagcaaatgaaatcctttctgccactgcctttgcagtgaactgcccttgctatcctcagaagatatatcacgggagcaaagaccctaagtgccatatcaacacctccaataagctgcagttgacccaaagaacaagccaatccatctcccacaggttccacacacactccactactcatcaccagacagggaaccctggcttgggcccacagcacagaccctccatcctgggccgattacactgagtgattgctaactcacatgtctctgggatggagcacccaggagacaagcaaagtggtggagcagcaagtcaggtgatgtggagcccagagggcagggagagctatctctctgggctccacttgcccttgtgagacactttgtcccagcactccttagtctgcttgcctctcccagggccccagcctggccacacctgcttacagggcactctcagatgcccataccatagtttctgtgctagtggaccgtaccatatcagtggagagctgcagcaaggtggcccntacggccacgcaccagcctgcacattacctctccatactgcagccctttatatggaaacttcctacatcactttgctgtgtgtgtttacacaggtggattttgctttacttgcactgacagcacacaggagggcagcacacaccccaacccacatcaactgccattaaagaaaagaaatttcagcccataatttcatgtccagcaaaattaggcatcataagtgaaggagaaataagatccttttcagacaagcaaatgctgagggaattcaatatcaccagatctaccttacaagagctcctgaaggaagcactaaatatggaaagaaaaaaccatcaccagccactacaaaaatgcagtgaagaacgcagtgaattacgcagtccagtgatgctaaaaaccaaccacatacgttaagtctgcaaaataaccagctgacagcatgacgacaggataaatccacacataccattactaaccttaaatgaaaatgggctaaatgctcccattgaaagacatggggcaagctggataaagaaccaagacccactggagtatgctgtcttcaagaaacccatctcacatgcggtggcatacataggctcaaaataaaggaatggagaaaaatatttcaagcaaatggaaaacagaaaaaagcaggtgttgcactcctactttctgacaaaacagactatgcgaataaagataaaaaagagaaggacattacaaaggtggtcctgacctttgatatatctcattgcttgataccaacctgggctgttttaattgcccaaanccaataggataatttgctgaggttgtggagcttctcccctgcagagagtccctgatctcccaaaatttggttgagatgtaaggttgattttgctgtacaactccttttctgaagttttactcatttccaaaaaggaaggcaagttttcctgcttccatgacgatggagagcaggcatctcctttcctgagtttcagcttgcttctgacagggaaggtgagtgtaagttttttccagcttctaagatggcagagaacgatcaccagcctgagccttatttccaggtaagtagctgaattagagttttgtcttaaaatttttccttaatgattaaaatgtaagattacccaccagctgcttttaatttctcccttagcattagaacactcagtaatcatatgaattgtgcatttgtttgttttgcttaactctttctgtttgtttatgtttggggttttattgttgttgtttcacttttctcccatctcttcctgacttggtcaaatccaaaggaatgttcgaaattgtggggagcaaggcatctgaaatggctaaaactcctgtggctgcaaaaaatagaaataaaaaaaaaaaaaaa

SEQ ID NO: 701 - DNA, 3228 bp, Homo sapien
  misc_feature (1)...(3228): n = A,T,C or G
tccgccccattgacgcaaatggcggtaggcgtgtacggtgggaggtctatataagcagagctctcnggctaactagagaacccactgcttactggcttatcgaaattaatacgactcactatagggagacccaagctggctagcgtttaaacttaagcttggtaccgagctcggatccactagtccagtgtggtggaattccattgtgttgggcaggaaacaagcaaagtggtggagcagcaagtcaggtgatgtggagcccagaggtcagggatggctgtctctctagggtccacttgcccttgtgagacactttatcccagcactttaggaatactgaggtcataccagccacatcttatatgcaagattgcccagcagagatcaggtccgagagttccctttttaaaaaaaggagacttgcttaataaaagaagtctagccacgtttgtgtagagcggctgtgctgtgctgggggttcacttttgagagagttctcctctgagacctgatctctggaggctgggcaatcttgcacttgagatggggctggtctgatctcagcactccttagtctgctcgcctctcccatggccccagcctggccacacctgcttacggggcactcttagatgcccacaccataacttccatgctagtggactgtaccatatcagtggagagctgcagcaaggtggcccctagagccacgcaccagcctgcacattgcctctccatacggcagccctttatttggaaacttcctaaatcactttgctgtgtgtgtttacacgggtgtgttttgctttacttgccctgagagcacacgggagtgcagcacacaccccaacccacatcaactgccattaaagaaaagaaatttcagcccagaatttcatgtccagcaaaattaagcatcataagtgaaggagaaataagatccttttcagacaagcaagtgctgagggaatttggtatcaccagatctaccttacgagagctcctgaaggaagcactaaatatggaaagaaaagatcatcacctgctactacaaaaacacactgaagtacacagtccaatgatgctaaaaagcaagcacatatgtaagtctgcaaaataaccagctgacagcatgacgacaggataaaatccacacataccattactaaccttaaatgtaaatgggctaaatgctcccattgaaagacacggggcaagctgggtaaagaaccaagacccactggagtatgccgtcttcaagcaacccatctcacgtgcagtgccatacataggctcaaaataaaggaatggagaaaaatatttcaagcaaatggaaaacagaaaaaaggtgttgcactcccagtttctgacaaaacagactctaccaataaagataaaaaaagagaaggacattacaaaggtggtcctgacctttgataaatctcattattgcttgataccaacctgggctatttgtattgcccaaacgaataggataatttgctgaggttgtggagcttctccccttcacagagtccctgatctccgaaaatttggttgagatgtaaggttgattttgctgtacaactccttttttgaagttttactcatttccaacaaggaaggcaagttttcctgcttccattgacaaaggagagcaggcacctcctttcctgagtttcagcttgcttctgacagggaaggagctttgagatttgaatactggcctgctgggttttggacgtgcattgggcctgtggtcccatttgtgttatttttctgggaaatttcttccctttggagtgagaaagcttacccaatgcctgtaccatcatcgtaccttaaaagaactccattttaagttcagggactccttggcagaagagaccgtagccttgtatcagatcataaaggagaagagcaagaggtccccggcaaacatccacagatggccttggaaataagtcaccttgctcaccctgcaggaatgccagtgaacttattgctgacatcttggagctcagtaccctcatagtgtaacggcgtcagcagatctgcctgtgctgggacttcctgtactacccattcctgaggggcgatgcttctgcagggcctgtgacttggtgcacaacttcagacaccatcatcttgcagcagcaccgcaccctcactagccagggtgttgatgacttcctcaaggccaaggccacattcaaggcttcggacttcattgatgcgcttgtgctgagcaaggtggcttctccgggatcttaattcaggaggtagaatggagcttgagatcaagtgtctgatcaagcctcagtgtatgggcgctgttcatcntctggtgctgaagcagccaagagacccaagtctgcctggctgcntcttaggatatgacagcagagccagtggcctctactagatcctgtacaacctcacaaaacacccagacatcgggagtgctgccagcctgtgatgcaagagtcctaatcctgaagacattgaatgacctgtcattctgctgtttttaccaaaaaggatcatgaggatcagagaggaaaagtcacttgcccaaagtcacacagctgaacagtggtggagttcaactttgaccgtgggctgtctgaccccaaggtgtatgcttgcttctctcccaagagacaactttcttatcaggctcaaatgaatgaaaggaggatgttaaaggtaggatctctgaagcctgtgccagtggaaccgcagctcatggctggcacctgtgttctcattcttacctcattaagagtaaagtttattgagtttattgaatttaagtatctttagtgagatcatatattattagtaagaactgggaccaaacagattttctgactctaaaagagagattttcacagaaacagatatatacctgtaagtatacagacacgcatacacacatttctttactgctcataaaaattagtccttattagaatgtgggatgtataaatgtaagagaattttcatgttaaaattgacagatacatttttaaattgtcctaaaataaatttaattatttttnttttagaattttccattattaatgttatttttatgagaaactatataactttattgataatacatacaataaccctttgtttttcaaattgaaaatacagtgtattttgcaaataactaagtcctaattttgtattaaaattttaaattttcaaaaaaaaaaa

SEQ ID NO: 702 - DNA, 4894 bp, Homo sapiens
ctgcacgcgctggctccgggtgacagccgcgcgcctcggccaggatctgagtgatgagacgtgtccccactgaggtgccccacagcagcaggtgttgagcatgggctgagaagctggaccggcaccaaagggctggcagaaatgggcgcctggctgattcctaggcagttggcggcagcaaggaggagaggccgcagcttctggagcagagccgagacgaagcagttctggagtgcctgaacggccccctgagccctacccgcctggcccactatggtccagaggctgtgggtgagccgcctgctgcggcaccggaaagcccagctcttgctggtcaacctgctaacctttggcctggaggtgtgtttggccgcaggcatcacctatgtgccgcctctgctgctggaagtgggggtagaggagaagttcatgaccatggtgctgggtgagtcactacatcctccttccttcctgttccagatacatgccacctggcatgtgggacaggagtacctctgccctgggagctgcttggagggagaggtggtctgctgggaaggcattgctgggcaggagggtgaccctgggctgagggggcacaccaagagaaagaagagaataccaaggacataccccagtcacctctggatccctggtcctgcacagagcctggctcataggagacactggagaaatgctcctaacctttggctagcccttttataatttatagcgattatctcatttaatgcttacaaccaccatttgaggtgatccattttacagagaaggaagcagaggcttttaagaggttaggtaagtcttagccaaagccaaatagcagctgaacagtagagctgggactccatcaaggtctcccagccggagcttgctcctacccctaggacaaggggtggactcctgactctgcagataaattctacaaaagccacagaaggcaagtagtaaccattgtgtgacaacccctcacccccaggaagaggggcccctgtgaggattgcaggctctggagtcacactgcttgttgaaacgctgcctcttaccctccctaggtctgcgcctttgaataagtatcacttcttagttgctccatgcctcagtttgtccatctgaaaatgggggcatctgtaatgcctgtgttatgaggagtaaattacagcatccctgtgaagacgtagcacagtgtcgagtacggaatgttatttccatccttctcacggagcttggttccccttccccttgccctttacttgtcccagccattgactcatactacttcccttcttgcaggcattggtccagtgctgggcctggtctgtgtcccgctcctaggctcagccagtgaccactggcgtggacgctatggccgccgccggcccttcatctgggcactgtccttgggcatcctgctgagcctctttctcatcccaagggccggctggctagcagggctgctgtgcccggatcccaggcccctggagctggcactgctcatcctgggcgtggggctgctggacttctgtggccaggtgtgcttcactccactggaggccctgctctctgacctcttccgggacccggaccactgtcgccaggcctactctgtctatgccttcatgatcagtcttgggggctgcctgggctacctcctgcctgccattgactgggacaccagtgccctggccccctacctgggcacccaggaggagtgcctctttggcctgctcaccctcatcttcctcacctgcgtagcagccacactgctggtggctgaggaggcagcgctgggccccaccgagccagcagaagggctgtcggccccctccttgtcgccccactgctgtccatgccgggcccgcttggctttccggaacctgggcgccctgcttccccggctgcaccagctgtgctgccgcatgccccgcaccctgcgccggctcttcgtggctgagctgtgcagctggatggcactcatgaccttcacgctgttttacacggatttcgtgggcgaggggctgtaccagggcgtgcccagagctgagccgggcaccgaggcccggagacactatgatgaaggtaaggccttggcagccagcagaggctggtgtgggagccgcccaccagagacgacactcggggctgtgtctgggctggtgcctctccatcctggccccgacttctctgtcaggaaagtggggatggaccccatctgcatacacggcttctcatgggtgtggaacatctctgcttgcggtttcaggaaggcctctggctgctctaggagtctgatcagagtcgttgccccagtttgacagaaggaaaggcggagcttattcaaagtctagagggagtggaggagttaaggctggatttcagatctgcctggttccagccgcagtgtgccctctgctcccccaacgactttccaaataatctcaccagcgccttccagctcaggcgtcctagaagcgtcttgaagcctatggccagctgtctttgtgttccctctcacccgcctgtcctcacagctgagactcccaggaaaccttcagactaccttcctctgccttcagcaaggggcgttgcccacattctctgagggtcagtggaagaacctagactcccattgctagaggtagaaaggggaagggtgctggggagcagggctggtccacagcaggtctcgtgcagcaggtacctgtggttccgccttctcatctccctgagactgctccgacccttccctcccaggctctgtctgatggcccctctccctctgcaggcgttcggatgggcagcctggggctgttcctgcagtgcgccatctccctggtcttctctctggtcatggaccggctggtgcagcgattcggcactcgagcagtctatttggccagtgtggcagctttccctgtggctgccggtgccacatgcctgtcccacagtgtggccgtggtgacagcttcagccgccctcaccgggttcaccttctcagccctgcagatcctgccctacacactggcctccctctaccaccgggagaagcaggtgttcctgcccaaataccgaggggacactggaggtgctagcagtgaggacagcctgatgaccagcttcctgccaggccctaagcctggagctcccttccctaatggacacgtgggtgytggaggcagtggcctgctcccacctccacccgcgctctgcggggcctctgcctgtgatgtctccgtacgtgtggtggtgggtgagcccaccgaggccagggtggttccgggccggggcatctgcctggacctcgccatcctggatagtgccttcctgctgtcccaggtggccccatccctgtttatgggctccattgtccagctcagccagtctgtcactgcctatatggtgtctgccgcaggcctgggtctggtcgccatttactttgctacacaggtagtatttgacaagagcgacttggccaaatactcagcgtagaaaacttccagcacattggggtggagggcctgcctcactgggtcccagctccctgctcctgttagccccatggggctgccgggctggccgccagtttctgttgctgccaaagtaatgtggctctctgctgccaccctgtgctgctgaggtgcgtagctgcacagctgggggctggggcgtccctctcctctctccccagtctctagggctgcctgactggaggccttccaagggggtttcagtctggacttatacagggaggccagaagggctccatgcactggaatgcggggactctgcaggtggattacccaggctcagggttaacagctagcctcctagttgagacacacctagagaagggtttttgggagctgaataaactcagtcacctggtttcccatctctaagccccttaacctgcagcttcgtttaatgtagctcttgcatgggagtttctaggatgaaacactccaccatgggatttgaacatatgaaagttatttgtaggggaagagtcctgaggggcaacacacaagaaccaggtcccctcagcccacagcactgtctttttgctgatccacccccctcttaccttttatcaggatgtggcctgttggtccttctgttgccatcacagagacacaggcatttaaatatttaacttatttatttaacaaagtagaagggaatccattgctagcttttctgtgttggtgtctaatatttgggtagggtgggggatccccaacaatcaggtcccctgagatagctggtcattgggctgatcattgccagaatcttcttctcctggggtctggccccccaaaatgcctaacccaggaccttggaaattctactcatcccaaatgataattccaaatgctgttacccaaggttagggtgttgaaggaaggtagagggtggggcttcaggtctcaacggcttccctaaccacccctcttctcttggcccagcctggttccccccacttccactcccctctactctctctaggactgggctgatgaaggcactgcccaaaatttcccctacccccaactttcccctacccccaactttccccaccagctccacaaccctgtttggagctactgcaggaccagaagcacaaagtgcggtttcccaagcctttgtccatctcagcccccagagtatatctgtgcttggggaatctcacacagaaactcaggagcaccccctgcctgagctaagggaggtcttatctctcagggggggtttaagtgccgtttgcaataatgtcgtcttatttatttagcggggtgaatattttatactgtaagtgagcaatcagagtataatgtttatggtgacaaaattaaaggctttcttatatgtttaaaaa

SEQ ID NO: 703 - DNA, 2904 bp, Homo sapiens
gtctatgccttcatgatcagtcttgggggctgcctgggctacctcctgcctgccattgactgggacaccagtgccctggccccctacctgggcacccaggaggagtgcctctttggcctgctcaccctcatcttcctcacctgcgtagcagccacactgctggtggctgaggaggcagcgctgggccccaccgagccagcagaagggctgtcggccccctccttgtcgccccactgctgtccatgccgggcccgcttggctttccggaacctgggcgccctgcttccccggctgcaccagctgtgctgccgcatgccccgcaccctgcgccggctcttcgtggctgagctgtgcagctggatggcactcatgaccttcacgctgttttacacggatttcgtgggcgaggggctgtaccagggcgtgcccagagctgagccgggcaccgaggcccggagacactatgatgaaggaaggcctctggctgctctaggagtctgatcagagtcgttgccccagtttgacagaaggaaaggcggagcttattcaaagtctagagggagtggaggagttaaggctggatttcagatctgcctggttccagccgcagtgtgccctctgctcccccaacgactttccaaataatctcaccagcgccttccagctcaggcgtcctagaagcgtcttgaagcctatggccagctgtctttgtgttccctctcacccgcctgtcctcacagctgagactcccaggaaaccttcagactaccttcctctgccttcagcaaggggcgttgcccacattctctgagggcgttcggatgggcagcctggggctgttcctgcagtgcgccatctccctggtcttctctctggtcatggaccggctggtgcagcgattcggcactcgagcagtctatttggccagtgtggcagctttccctgtggctgccggtgccacatgcctgtcccacagtgtggccgtggtgacagcttcagccgccctcaccgggttcaccttctcagccctgcagatcctgccctacacactggcctccctctaccaccgggagaagcaggtgttcctgcccaaataccgaggggacactggaggtgctagcagtgaggacagcctgatgaccagcttcctgccaggccctaagcctggagctcccttccctaatggacacgtgggtgctggaggcagtggcctgctcccacctccacccgcgctctgcggggcctctgcctgtgatgtctccgtacgtgtggtggtgggtgagcccaccgaggccagggtggttccgggccggggcatctgcctggacctcgccatcctggatagtgccttcctgctgtcccaggtggccccatccctgtttatgggctccattgtccagctcagccagtctgtcactgcctatatggtgtctgccgcaggcctgggtctggtcgccatttactttgctacacaggtagtatttgacaagagcgacttggccaaatactcagcgtagaaaacttccagcacattggggtggagggcctgcctcactgggtcccagctccccgctcctgttagccccatggggctgccgggctggccgccagtttctgttgctgccaaagtaatgtggctctctgctgccaccctgtgctgctgaggtgcgtagctgcacagctgggggctggggcgtccctctcctctctccccagtctctagggctgcctgactggaggccttccaagggggtttcagtctggacttatacagggaggccagaagggctccatgcactggaatgcggggactctgcaggtggattacccaggctcagggttaacagctagcctcctagttgagacacacctagagaagggtttttgggagctgaataaactcagtcacctggtttcccatctctaagccccttaacctgcagcttcgtttaatgtagctcttgcatgggagtttctaggatgaaacactcctccatgggatttgaacatatgaaagttatttgtaggggaagagtcctgaggggcaacacacaagaaccaggtcccctcagcccacagcactgtctttttgctgatccacccccctcttaccttttatcaggatgtggcctgttggtccttctgttgccatcacagagacacaggcatttaaatatttaacttatttatttaacaaagtagaagggaatccattgctagcttttctgtgttggtgtctaatatttgggtagggtgggggatccccaacaatcaggtcccctgagatagctggtcattgggctgatcattgccagaatcttcttctcctggggtctggccccccaaaatgcctaacccaggaccttggaaattctactcatcccaaatgataattccaaatgctgttacccaaggttagggtgttgaaggaaggtagagggtggggcttcaggtctcaacggcttccctaaccacccctcttctcttggcccagcctggttccccccacttccactcccctctactctctctaggactgggctgatgaaggcactgcccaaaatttcccctacccccaactttcccctacccccaactttccccaccagctccacaaccctgtttggagctactgcaggaccagaagcacaaagtgcggtttcccaagcctttgtccatctcagcccccagagtatatctgtgcttggggaatctcacacagaaactcaggagcaccccctgcctgagctaagggaggtcttatctctcagggggggtttaagtgccgtttgcaataatgtcgtcttatttatttagcggggtgaatattttatactgtaagtgagcaatcagagtataatgtttatggtgacaaaattaaaggctttcttatatgtttaaaaa

SEQ ID NO: 704 - DNA, 4034 bp, Homo sapiens
aaccagcctgcacgcgctggctccgggtgacagccgcgcgcctcggccaggatctgagtgatgagacgtgtccccactgaggtgccccacagcagcaggtgttgagcatgggctgagaagctggaccggcaccaaagggctggcagaaatgggcgcctggctgattcctaggcagttggcggcagcaaggaggagaggccgcagcttctggagcagagccgagacgaagcagttctggagtgcctgaacggccccctgagccctacccgcctggcccactatggtccagaggctgtgggtgagccgcctgctgcggcaccggaaagcccagctcttgctggtcaacctgctaacctttggcctggaggtgtgtttggccgcaggcatcacctatgtgccgcctctgctgctggaagtgggggtagaggagaagttcatgaccatggtgctgggcattggtccagtgctgggcctggtctgtgtcccgctcctaggctcagccagtgaccactggcgtggacgctatggccgccgccggcccttcatctgggcactgtccttgggcatcctgctgagcctctttctcatcccaagggccggctggctagcagggctgctgtgcccggatcccaggcccctggagctggcactgctcatcctgggcgtggggctgctggacttctgtggccaggtgtgcttcactccactggaggccctgctctctgacctcttccgggacccggaccactgtcgccaggcctactctgtctatgccttcatgatcagtcttgggggctgcctgggctacctcctgcctgccattgactgggacaccagtgccctggccccctacctgggcacccaggaggagtgcctctttggcctgctcaccctcatcttcctcacctgcgtagcagccacactgctggtggctgaggaggcagcgctgggccccaccgagccagcagaagggctgtcggccccctccttgtcgccccactgctgtccatgccgggcccgcttggctttccggaacctgggcgccctgcttccccggctgcaccagctgtgctgccgcatgccccgcaccctgcgccggctcttcgtggctgagctgtgcagctggatggcactcatgaccttcacgctgttttacacggatttcgtgggcgaggggctgtaccagggcgtgcccagagctgagccgggcaccgaggcccggagacactatgatgaaggtaaggccttggcagccagcagaggctggtgtgggagccgcccaccagagacgacactcggggctgtgtctgggctggtgcctctccatcctggccccgacttctctgtcaggaaagtggggatggaccccatctgcatacacggcttctcatgggtgtggaacatctctgcttgcggtttcaggaaggcctctggctgctctaggagtctgatcagagtcgttgccccagtttgacagaaggaaaggcggagcttattcaaagtctagagggagtggaggagttaaggctggatttcagatctgcctggttccagccgcagtgtgccctctgctcccccaacgactttccaaataatctcaccagcgccttccagctcaggcgtcctagaagcgtcttgaagcctatggccagctgtctttgtgttccctctcacccgcctgtcctcacagctgagactcccaggaaaccttcagactaccttcctctgccttcagcaaggggcgttgcccacattctctgagggtcagtggaagaacctagactcccattgctagaggtagaaaggggaagggtgctggggagcagggctggtccacagcaggtctcgtgcagcaggtacctgtggttccgccttctcatctccctgagactgctccgacccttccctcccaggctctgtctgatggcccctctccctctgcaggcgttcggatgggcagcctggggctgttcctgcagtgcgccatctccctggtcttctctctggtcatggaccggctggtgcagcgattcggcactcgagcagtctatttggccagtgtggcagctttccctgtggctgccggtgccacatgcctgtcccacagtgtggccgtggtgacagcttcagccgccctcaccgggttcaccttctcagccctgcagatcctgccctacacactggcctccctctaccaccgggagaagcaggtgttcctgcccaaataccgaggggacactggaggtgctagcagtgaggacagcctgatgaccagcttcctgccaggccctaagcctggagctcccttccctaatggacacgtgggtgctggaggcagtggcctgctcccacctccacccgcgctctgcggggcctctgcctgtgatgtctccgtacgtgtggtggtgggtgagcccaccgaggccagggtggttccgggccggggcatctgcctggacctcgccatcctggatagtgccttcctgctgtcccaggtggccccatccctgtttatgggctccattgtccagctcagccagtctgtcactgcctatatggtgtctgccgcaggcctgggtctggtcgccatttactttgctacacaggtagtatttgacaagagcgacttggccaaatactcagcgtagaaaacttccagcacattggggtggagggcctgcctcactgggtcccagctccccgctcctgttagccccatggggctgccgggctggccgccagtttctgttgctgccaaagtaatgtggctctctgctgccaccctgtgctgctgaggtgcgtagctgcacagctgggggctggggcgtccctctcctctctccccagtctctagggctgcctgactggaggccttccaagggggtttcagtctggacttatacagggaggccagaagggctccatgcactggaatgcggggactctgcaggtggattacccaggctcagggttaacagctagcctcctagttgagacacacctagagaagggtttttgggagctgaataaactcagtcacctggtttcccatctctaagccccttaacctgcagcttcgtttaatgtagctcttgcatgggagtttctaggatgaaacactcctccatgggatttgaacatatgaaagttatttgtaggggaagagtcctgaggggcaacacacaagaaccaggtcccctcagcccacagcactgtctttttgctgatccacccccctcttaccttttatcaggatgtgcctgttggtccttctgttgccatcacagagacacaggcatttaaatatttaacttatttatttaacaaagtagaagggaatccattgctagcttttctgtgttggtgtctaatatttgggtagggtgggggatccccaacaatcaggtcccctgagatagctggtcattgggctgatcattgccagaatcttcttctcctggggtctggccccccaaaatgcctaacccaggaccttggaaattctactcatcccaaatgataattccaaatgctgttacccaaggttagggtgttgaaggaaggtagagggtggggcttcaggtctcaacggcttccctaaccacccctcttctcttggcccagcctggttccccccacttccactcccctctactctctctaggactgggctgatgaaggcactgcccaaaatttcccctacccccaactttcccctacccccaactttccccaccagctccacaaccctgtttggagctactgcaggaccagaagcacaaagtgcggtttcccaagcctttgtccatctcagcccccagagtatatctgtgcttggggaatctcacacagaaactcaggagcaccccctgcctgagctaagggaggtcttatctctcagggggggtttaagtgccgtttgcaataatgtcgtcttatttatttagcggggtgaatattttatactgtaagtgagcaatcagagtataatgtttatggtgacaaaattaaaggctttcttatatgtttaaaaa

SEQ ID NO: 705 - DNA, 6976 bp, Homo sapiens
gaagctggaccggcaccaaagggctggcagaaatgggcgcctggctgattcctaggcagttggcggcagcaaggaggagaggccgcagcttctggagcagagccgagacgaagcagttctggagtgcctgaacggccccctgagccctacccgcctggcccactatggtccagaggctgtgggtgagccgcctgctgcggcaccggaaagcccagctcttgctggtcaacctgctaacctttggcctggaggtgtgtttggccgcaggcatcacctatgtgccgcctctgctgctggaagtgggggtagaggagaagttcatgaccatggtgctgggtgagtcactacatcctccttccttcctgttccagatacatgccacctggcatgtgggacaggagtacctctgccctgggagctgcttggagggagaggtggtctgctgggaaggcattgctgggcaggagggtgaccctgggctgagggggcacaccaagagaaagaagagaataccaaggacataccccagtcacctctggatccctggtcctgcacagagcctggctcataggagacactggagaaatgctcctaacctttggctagcccttttataatttatagcgattatctcatttaatgcttacaaccaccatttgaggtgatccattttacagagaaggaagcagaggcttttaagaggttaggtaagtcttagccaaagccaaatagcagctgaacagtagagctgggactccatcaaggtctcccagccggagcttgctcctacccctaggacaaggggtggactcctgactctgcagataaattctacaaaagccacagaaggcaagtagtaaccattgtgtgacaacccctcacccccaggaagaggggcccctgtgaggattgcaggctctggagtcacactgcttgttgaaacgctgcctcttaccctccctaggtctgcgcctttgaataagtatcacttmttagttgctccatgcctcagtttgtccatctgaaaatgggggcatctgtaatgcctgtgttatgaggagtaaattacagcatccctgtgaagacgtagcacagtgtcgagtacggaatgttatttccatccttctcacggagcttggttccccttccccttgccctttacttgtcccagccattgactcatactacttcccttcttgcaggcattggtccagtgctgggcctggtctgtgtcccgctcctaggctcagccagtgaccactggcgtggacgctatggccgccgccggcccttcatctgggcactgtccttgggcatcctgctgagcctctttctcatcccaagggccggctggctagcagggctgctgtgcccggatcccaggcccctggagctggcactgctcatcctgggcgtggggctgctggacttctgtggccaggtgtgcttcactccactggaggccctgctctctgacctcttccgggacccggaccactgtcgccaggcctactctgtctatgccttcatgatcagtcttgggggctgcctgggctacctcctgcctgccattgactgggacaccagtgccctggccccctacctgggcacccaggaggagtgcctctttggcctgctcaccctcatcttcctcacctgcgtagcagccacactgctggtggctgaggaggcagcgctgggccccaccgagccagcagaagggctgtcggccccctccttgtcgccccactgctgtccatgccgggcccgcttggctttccggaacctgggcgccctgcttccccggctgcaccagctgtgctgccgcatgccccgcaccctgcgccggctcttcgtggctgagctgtgcagctggatggcactcatgaccttcacgctgttttacacggatttcgtgggcgaggggctgtaccagggcgtgcccagagctgagccgggcaccgaggcccggagacactatgatgaaggtaaggccttggcagccagcagaggctggtgtgggagccgcccaccagagacgacactcggggctgtgtctgggctggtgcctctccatcctggccccgacttctctgtcaggaaagtggggatggaccccatctgcatacacggcttctcatgggtgtggaacatctctgcttgcggtttcaggaaggcctctggctgctctaggagtctgatcagagtcgttgccccagtttgacagaaggaaaggcggagcttattcaaagtctagagggagtggaggagttaaggctggatttcagatctgcctggttccagccgcagtgtgccctctgctcccccaacgactttccaaataatctcaccagcgccttccagctcaggcgtcctagaagcgtcttgaagcctatggccagctgtctttgtgttccctctcacccgcctgtcctcacagctgagactcccaggaaaccttcagactaccttcctctgccttcagcaaggggcgttgcccacattctctgagggtcagtggaagaacctagactcccattgctagaggtagaaaggggaagggtgctggggagcagggctggtccacagcaggtctcgtgcagcaggtacctgtggttccgccttctcatctccctgagactgctccgacccttccctcccaggctctgtctgatggcccctctccctctgcaggcgttcggatgggcagcctggggctgttcctgcagtgcgccatctccctggtcttctctctggtcatggaccggctggtgcagcgattcggcactcgagcagtctatttggccagtgtggcagctttccctgtggctgccggtgccacatgcctgtcccacagtgtggccgtggtgacagcttcagccgccctcaccgggttcaccttctcagccctgcagatcctgccctacacactggcctccctctaccaccgggagaagcaggtactcattggccagtgggtggagtcagggtgggaggggtggtctgggtttttgggaggccaactagctcagaacctggtatctggcaagcaactttggagaatgcttctttgaatcagagaagaagcttatcctagccccagggccagaggcttgggctgcagaacagtgtagattagattctgggaatgacttcctggggtcaggactgtgtagcacttgaatggatgattgcaggaaatgcaaaatacgatagtgggaatcccgaagggtcaggccagcaggagccctaggcttctaggctggttgttctatggagaggcagggcgctgaatcagatgacccctgggccattcagcctcagcagacgggagtgggaatggtccagccttagcaacacctttcttcagggagcagcaacctgacttagcctgtatcctactctggtctctgagatggggcaggctccttcctaccccctttctttctggcttatttttcttttctgtctaattcccttttcttttcctgcatccctcctttgcctccttccctttctccttccccttccccttcccctgtggcagatatctgagcttgacacctgacccactcacttgggcactgtgtaagttgtggggacctccttcttggttggccctacactaaccagcccctccaggggcccctttccttgggaagccacctaacccaggtagtgtggtcatccttgtcccctccactgacctcactgagctacaaacctgggtgctggactctgccttgaggggcatgaagttggggtgtcccaagggaggaggagatgcaggactgctctcatagagctctcagactgtagggaagacctgcccctgcgtctcgtagcacttgaggagaggagtaggtaagttcgtagctgagaggctggttaactgagtaggtagctgcaggggtgagaggtatggaggggaggggctaaggttttggttgggggagcctggtccctgagacccctgttagcccactgataaccttcttcagccttcactcttctgcttgcctgggctgggggcagggggctggcatcagcggccaggcctgagtatgtgctgtcgtgccagggaacgttctggggctagccatcttctccagatggaggagcatgtctgtcctcggaccactccagactccaacctcagcggacattcctggggtggcaggcagggaggagaagtcctgggaggccccttcctaacagcagctgatggcagacttggcactgcacgctgtctgcctgttcctttgcccacttgttgagctgcatggtgagccgtgggcttccctggtgtcaggtttgagctctgccatggctcccacctcgcaaatgcagccaactcaactcttctggcatggggacaatgttggataagacctggccttgtccttaaataggaggctctgggccatcaagggcaggggttggggggatggtggtcgaccagtcactctgatctaagtcagacagcaggaaggaagtgagaagccttcaacattagcacagctggggctgggggaggtgggaagagggacattcctcctgcttggggtctactggattctccctgccccaaggctggggacaagggagctcatggcagggcagctaccctagtggcatctgggaccccagagaggcagagcttctctgcaccgggcaatgaggatttccagatgtcggagtggagggcaggcaggaaggaaggttaggagagcctgcgtggggtttgggccatcaggggccctgccttggcttttgttcctctgttctgtgcatctcttaccaccgtcttcattccccctgtgtcttttccttaccttggagctctgttctctctgatctgtgatattgagtttgtctgcctcttacctgttctaagaggctagaggagacctagacttctgggttcacatttgtccccgccctaccccgttacccttctcccactcctgaggaagggtcctggttagacttggaccaagtagggtctccatcttctctcctgctcctgattctcatgaagtcccattgcccctgggatggaggcaagggtctgttctcacagctggggtggtgccagtgctgggtacacacctgtcctcttccccttttcttcacccctctgccttaggtgttcctgcccaaataccgaggggacactggaggtgctagcagtgaggacagcctgatgaccagcttcctgccaggccctaagcctggagctcccttccctaatggacacgtgggtgctggaggcagtggcctgctcccacctccacccgcgctctgcggggcctctgcctgtgatgtctccgtacgtgtggtggtgggtgagcccaccgaggccagggtggttccgggccggggcatctgcctggacctcgccatcctggatagtgccttcctgctgtcccaggtggccccatccctgtttatgggctccattgtccagctcagccagtctgtcactgcctatatggtgtctgccgcaggcctgggtctggtcgccatttactttgctacacaggtagtatttgacaagagcgacttggccaaatactcagcgtagaaaacttccagcacattggggtggagggcctgcctcactgggtcccagctccccgctcctgttagccccatggggctgccgggctggccgccagtttctgttgctgccaaagtaatgtggctctctgctgccaccctgtgctgctgaggtgcgtagctgcacagctgggggctggggcgtccctctcctctctccccagtctctagggctgcctgactggaggccttccaagggggtttcagtctggacttatacagggaggccagaagggctccatgcactggaatgcggggactctgcaggtggattacccaggctcagggttaacagctagcctcctagttgagacacacctagagaagggtttttgggagctgaataaactcagtcacctggtttcccatctctaagccccttaacctgcagcttcgtttaatgtagctcttgcatgggagtttctaggatgaaacactcctccatgggatttgaacatatgaaagttatttgtaggggaagagtcctgaggggcaacacacaagaaccaggtcccctcagcccacagcactgtctttttgctgatccacccccctcttaccttttatcaggatgtggcctgttggtccttctgttgccatcacagagacacaggcatttaaatatttaacttatttatttaacaaagtagaagggaatccattgctagcttttctgtgttggtgtctaatatttgggtagggtgggggatccccaacaatcaggtcccctgagatagctggtcattgggctgatcattgccagaatcttcttctcctggggtctggccccccaaaatgcctaacccaggaccttggaaattctactcatcccaaatgataattccaaatgctgttacccaaggttagggtgttgaaggaaggtagagggtggggcttcaggtctcaacggcttccctaaccacccctcttctcttggcccagcctggttccccccacttccactcccctctactctctctaggactgggctgatgaaggcactgcccaaaatttcccctacccccaactttcccctacccccaactttccccaccagctccacaaccctgtttggagctactgcaggaccagaagcacaaagtgcggtttcccaagcctttgtccatctcagcccccagagtatatctgtgcttggggaatctcacacagaaactcaggagcaccccctgcctgagctaagggaggtcttatctctcagggggggtttaagtgccgtttgcaataatgtcgtcttatttatttagcggggtgaatattttatactgtaagtgagcaatcagagtataatgtttatggtgacaaaattaaaggctttcttatatgtttaaaaaaa

SEQ ID NO: 706 - protein, 123 aa, Homo sapiens [sequence omitted]

SEQ ID NO: 707 - protein, 150 aa, Homo sapiens
MVQRLWVSRLLRHRKAQLLLVNLLTFGLEVCLAAGITYVPPLLLEVGVEEKFMTMVLGESLHPPSFLFQIHATWHVGQEYLCPGSCLEGEVVCWEGIAGQEGDPGLRGHTKRKKRIPRTYPSHLWIPGPAQSLAHRRHWRNAPNLWLALL

SEQ ID NO: 708 - protein, 371 aa, Homo sapiens [sequence omitted]

SEQ ID NO: 709 - DNA, 141 bp, Homo sapiens
  misc_feature (1)...(141): n=A,T,C or G
tacggcgtggtgcggagggcggtaccccacaaataacacnnacaccccatcctatctgtgtccacanataaantgactcattcctctcctcgcatancccactntcccctngcgataccgtaacnaancccttcccccttt

SEQ ID NO: 710 - DNA, 196 bp, Homo sapiens
  misc_feature (1)...(196): n=A,T,C or G
cnatccttcncntacacccatgangtccatgtcgcacgtccacctcccctcaaaacttgggtccncatccacccgtcactctccccntaancnataaccccttttngcgaatagaccccaccttancaatnggtttttcnttttttgtccctnggnccgngcgattcaanaaattgaaggcccanaaaaaccccct

SEQ ID NO: 711 - DNA, 177 bp, Homo sapiens
  misc_feature (1)...(177): n=A,T,C or G
ntacntcnctccnaatgaaattcgaanctcggttacccgggggnattccgattaggngcgtantctcggatgtgcagtcacaagtcttttgctaatncttataattntcnctaccctttcttcnacaatactgctatcctanttnttctntcncctctctcccannttactaaccac

SEQ ID NO: 712 - DNA, 185 bp, Homo sapiens
  misc_feature (1)...(185): n=A,T,C or G
aaacgnaccanngccaacgatangtgttggngttggttgcggttgttcctcttatntgcactggttgtccgtgtcgcacgganggccacgtccctctgncntgagtancacatagcatccacgtttagtcgactntnccgggcggccgctctacccntntatngattcttattaaaantcggatc

SEQ ID NO: 713 - DNA, 172 bp, Homo sapiens
  misc_feature (1)...(172): n=A,T,C or G
nntggtcgcctgngcgtntactctaaaggatntactatncatatggantcnaanacgactcactacacggcnctctncggagccnnggtcagtgcctnctnggagaccttctctggggcaggangagcactnggtatgttcacgtatcncttcntaaanatacnnccctccg

SEQ ID NO: 714 - DNA, 112 bp, Homo sapiens
  misc_feature (1)...(714): n=A,T,C or G
nttgcgtgcctggacgtntactctgcangatctactactcatgngaattctaantacggactcactatncggcancgcaggcgcagcagggaangggtcacctcccagtctc

SEQ ID NO: 715 - DNA, 326 bp, Homo sapiens
  misc_feature (1)...(326): n=A,T,C or G
tactctanaggatctncgngtcatntggattctatntcgactcactctagggctcnagcngtcngccgggcaagttattcggatcgtcgggntccgagcttcgcaattaantgtgccatcgttctncaacgttcctgactnggaanccccngcngttcngatccncnggtacctagctccanntcccccgtnctccttctggngtntcatnaangaggaccnccctcgatcncccttccttaatctgcncacnctgaacgnccaatggacatngtgcgtttaatntannaggcccgnttcgngtgcccttcccgtnanntcagctc

SEQ ID NO: 716 - DNA, 122 bp, Homo sapiens
  misc_feature (1)...(122): n=A,T,C or G
nntgcgtcgcctgngcgtntactctagatgatctgantagtcatatggattctaatacgactcannatagggctctagcgnggatncngattcgtcntccngattcantgacnccggtanca

SEQ ID NO: 717 - DNA, 203 bp, Homo sapiens
  misc_feature (1)...(203): n=A,T,C or G
cntgcatgcctgcaggtcgactctagaggatctactagtcatatggatcgagcggccgcccgggcaggtgtnaatgataaanatgcatcatactancctacagaanggagagataatgttngntggaccangttggttttcttgcgtgtgtgtggcagtagtaagttattagtttttanaatcantaccgccctccgcaccac

SEQ ID NO: 718 - DNA, 168 bp, Homo sapiens
  misc_feature (1)...(168): n=A,T,C or G
ggcaggangatcncttgagccccngaggtcgaggctacagtgagccangagtgcactactgtnncgccctccgcatncacgngtggtccgatccccgggtaccganctnganttcactgganttctttttaancgtnttgantggtacnaccctcgantccctggctg

SEQ ID NO: 719 - DNA, 210 bp, Homo sapiens
  misc_feature (1)...(210): n=A,T,C or G
cancgtcgncataacacgtattttntgatnaagattctnactgacccatnaantctacntctcaagctcttncanngtccagtnaanggaatgtgtatnngtngggatnccacanaaaaaaganatntcggncgcttcattantcatccttcttacccanntctctngatncncagtntgancntgaacgcacactacnggatntctcca

SEQ ID NO: 720 - DNA, 131 bp, Homo sapiens
  misc_feature (1)...(131): n=A,T,C or G
tccatcctaatacgactcactatagggctgccaacctgccatccactactgaggaagacccgnanacttaggggctcactgcgagccaccggccacaggtcgtatagggcaaagcacgnggaagcacccct

SEQ ID NO: 721 - DNA, 121 bp, Homo sapiens
  misc_feature (1)...(121): n=A,T,C or G
tccatcctaatacgactcactatagggccgntgantnctggcgaaaggcttacaattaagnaggaaaaanganccaacaactaaaaaaaanncggncgtgncagcttngatgactngtcca

SEQ ID NO: 722 - DNA, 246 bp, Homo sapiens
  misc_feature (1)...(246): n=A,T,C or G
anctggagtcgcgcgctgcagtcacattgtggatccanaaaatcggcacaagctctcntggnttcntcgatatgaanaacactaatcccatgtngtntgngtctccgtgattcatccctcgcacnggtccccntccnaaccnttgcataggtgttatgttgtantctccccagtgcacaaagattnacactctctcantgtctganatatgcacgagttcattgtcctgtcnccgtnaacatcaag

SEQ ID NO: 723 - DNA, 160 bp, Homo sapiens
  misc_feature (1)...(160): n=A,T,C or G
cctccggaaaatccaantagagtaantncnctctaatccggggnaattggnggggtnnatacgtcctcctccccccagntaggattnanaaaaggnctcccagancaaaanctccaaagtgnatcnantagccgtncccganatncaacgcccctacgtc

SEQ ID NO: 724 - DNA, 156 bp, Homo sapiens
  misc_feature (1)...(156): n=A,T,C or G
tnanccnatatacaccaaattctgattctaaantcccacccaagggaaaaaagttgagaagagcctttccacttttctactaataaaaaaatgcaccagcccctaccannagtgnggaaaacctccttaggcccttgnntggaacaancgaaaatc

SEQ ID NO: 725 - DNA, 347 bp, Homo sapiens
  misc_feature (1)...(347): n=A,T,C or G
aganggttntatncatgctgtactcgcgcgcctgcagtcgacactagtggatccaaagaattcggcacgagagacggtgcgcgatggaccgagggccccagccggngaggcgccgccgccgagcccgcggncagacgccccatcagtagcgtccgcaccgggnagccgcggntctcgcccgagccgtgggcgcgcccgaggggcgggctcgcctcccgccgtccctcgcagctctgccgggcccgagcccgcgccgtcgccgccgccgncttgccgctcggnccgcgcggnccggnaaacgcggtcgaggtctggatgnggcanngcccgcncctntcgctgagcct

SEQ ID NO: 726 - DNA, 162 bp, Homo sapiens
  misc_feature (1)...(162): n=A,T,C or G
ttgggtgggttgggtgggggnaaatttncccatttgggtgggtttgggggggnaaatacttcccgccttttnggtncccaaaganacnaagggggagtcccttnatagaggnagngcgatncntcncaacnacntngactttgnccatggggagnaaggtgg

SEQ ID NO: 727 - DNA, 120 bp, Homo sapiens
  misc_feature (1)...(120): n=A,T,C or G
gtgtgggtggggaattccattgtggttgggggnaaatctccgcttgtccaaagnacagggggggtcncttanagngnagggggttcctccccaccacttgncttgnccattgngagnaag

SEQ ID NO: 728 - DNA, 130 bp, Homo sapiens
  misc_feature (1)...(130): n=A,T,C or G
gacccactgcagcgttnaacttagcttggaccgagctcggatccctagtccgtgtggtggaattccatgtgtcgagagaggggcaaatacnctccaanacancnccctcatgctcnacacatattcgcat

SEQ ID NO: 729 - DNA, 182 bp, Homo sapiens
  misc_feature (1)...(182): n=A,T,C or G
cngactgctngcgtttaaacttaagcnaggtaccgaacggggatnnacgactantgatcggctggctgcttccagtcgattanatttgtgaaaaagctgaaccncngccngttaagggggannatgcaaaanatncatccnnctgccccntaaactgntctntccnagggaaaaaanggaag

SEQ ID NO: 730 - DNA, 678 bp, Homo sapiens
  misc_feature (1)...(678): n=A,T,C or G
cactcncactccggacctaggcncttcaccactgctctcttcctcctcctcctcctcntcctcggggctgggggaccttccccagtgaccatctcactttggctgaancccactcggggcagcctgagtttggggctcttggccttctcaccctcctcggccccctccttggcccgcaccaggccaaaccggggcagccgtaccttgagcttgtgtccggcctctccctccccctctgccacctggtactcggcatggttgcccccgggatggcgagagctccacgtcgggcagtgagaagcagaaagtacgctcggcccctgggggctgctcctcagcaccctcgccccccaccctagctctggcccccagtgtgggcaacttcagcctcagcccaccctcgcctgtggccgcctcgcccgcctgtgcctctcggcttagccccacgtccaactcaagctggggcactgtcacggtgggcatcttaaagacaccctcacccaccagcagctcaccacctgcaacctgggctccaggcaaaaaaagggtcacctggggcanctgaaccctgtacctgctgtgccctctgctgaanggaatgttatctgaacctgctgccctgggggtactgccttcccaaaaccgggtcaantccacctgttggaaggnaaatncccc

SEQ ID NO: 731 - DNA, 135 bp, Homo sapiens
  misc_feature (1)...(135): n=A,T,C or G
gagatccgacgtcacccccttccggcggcccaagacgctgcaactcccgaggcngcccaaatatctttggaagagcgctcccagcccaacacaatggaattccaccacactggnntagtggatccgagctaagcc

SEQ ID NO: 732 - DNA, 660 bp, Homo sapiens
  misc_feature (1)...(660): n=A,T,C or G
gcttggtaccgagctnggatccctagtaacggccgccagtgtgctggaattcggctttcttcaatcagntnacgagctgcatggtctgctaacattgtcataattgctggcatagattactgaaaataaagaaaaaaaattgaagctgcctatcaagttttggtattatcaaaaacttcctacaagttattttacttcaaccatgttattacaaatattttaatgaatactttagagactttaattacaaaaaactgagatagtaaaagcaagtaataaaagctgaaattacttagctatttgataattacataaattattatggtccattcaacttttctagtgtttagtttatacaccaggaagactttcctattctactaacatttataaagtatgctaacctattatttaaacgcatccactattaggattttatggcctaaaacgtgatacagttcagtatcttgatgtcaaaactttttaagcaagtagggattaagttcaagtgaatgtgattttctttcttcccagtagggtcttctgaataactcagnaaagctcacttccattatcttactttataaaaaaatgctataagacagaatgggccgacgtggnggctccacctgtatccacctttggaggcgagnggcgaat

SEQ ID NO: 733 - DNA, 836 bp, Homo sapiens
  misc_feature (1)...(836): n=A,T,C or G
aattaatgactttttttccgccctgccaagctagtttgtctaaatataatgtaaagaaattagctactcattttctggtccacgaaggttcctaaaatgggaagaagtggagatctgaccttgttagttctaaatacactaaactgggagtgccatggatggctttcaggatgtcctgaatcctctataattgtatacaaaatcgtgagtttttaaaaactgggttagagctattggttcctcagagtctcaggcatcttagacccccaaaaaggttaaggactactgacttaaccaattaggtttgagtggcattggctttgaagaaaagcagaggaaagatatattttataattctgggcaacaaaaaagtggatgtgtgccagcatcttagagtagaatcctcttaaaaggatagcactgcatatgaactagtaggttttaaccagtgcatatttaggcgaagtagctcatttttctgttagaattcttttttatttgggaatgggcaagcttttacagcttttaccttgccaatgaatacctggaatttaaaaaatcttgttaggcatattgcccataaagttttttttcctagatcatatattcagtaaatatgtttgtagctttatttcaatcccccaattcattgagggttgaaacaatttgaatggtttgagtgtagaagctaagttatttctgtagaggctaagggcatttataccaanatatgttagacttgnggntcctgttaaccatgctgtanacaataggaattactgtatatccacattttaattttaacatcttctgctttgntgntggtttgagangga

SEQ ID NO: 734 - DNA, 694 bp, Homo sapiens
  misc_feature (1)...(694): n=A,T,C or G
nagtnctatttncactaaactgngagtgccttggatggctttcaggatgtcctgaatcctctataattgtatacaaaatcgtgagtttttaaaaactgggttagagctattggttcctcagagtctcaggcatcttagacccccaaaaaggttaaggactactgacttaaccaattaggtttgagtggcattggctttgaagaaaagcagaggaaagatatattttataattctgggcaacaaaaaagtggatgtgtgccagcatcttagagtagaatcctcttaaaaggatagcactgcatatgaactagtaggttttaaccagtgcatatttaggcgaagtagctcatttttctgttagaattcttttttatttgggaatgggcaagcttttacagcttttaccttgccaatgaatacctggaatttaaaaaatcttgttaggcatattgcccataaagttttttttcctagatcatatattcagtaaatatgtttgtagctttatttcaatcccccaattcattgagggttgaaacaatttgaatggtttgagtgtagaagctaagttatttctgtagaggctaagggcatttataccaagatatgttagacttgtggttcctgttaaccattgctgtagacaataggaattactgtatatccacattttaatttttaacatcattctgtc

SEQ ID NO: 735 - DNA, 126 bp, Homo sapiens
  misc_feature (1)...(126): n=A,T,C or G
ncnttgaaacnggttgaccagacttcaggcctgtgcgctcaatcgtggagaatctcgtgccgaattcggcacgagtctctctctctctctctctctctctctctctctctntctctctctctctct

SEQ ID NO: 736 - DNA, 165 bp, Homo sapiens
  misc_feature (1)...(165): n=A,T,C or G
cagaagcctttaaaccggttngaccagacttcaggcctgtgcgctcaatcgtggagaatctcgtgccgaattcggcacgagtctctctctctctctctctctctctctctctctctctctctctctctctctctctctctctctctctctctctctctctctctc

SEQ ID NO: 737 - DNA, 125 bp, Homo sapiens
  misc_feature (1)...(125): n=A,T,C or G
ggnagcccctttaaccgtttgtccagacttcaggcctgtgcgctcaatcgtggagaatctcgtgccgaattcggcacgagtctctctctctctctctctctctctctctctctctntctctctct

SEQ ID NO: 738 - DNA, 137 bp, Homo sapiens
  misc_feature (1)...(137): n=A,T,C or G
ggagncncttgancaggatgaccgacttcaggcctgtgcgctcaatcgtggagaatctcgtgccgaattcggcacgagtctctctctctctctctctctctctctctctctctctctctctctctctctctctctct

SEQ ID NO: 739 - DNA, 970 bp, Homo sapiens
  misc_feature (1)...(970): n=A,T,C or G
aggcctatttaggtgacactatagaacaagtttgtacaaaaaagcaggctggtaccggtccggaattcgcggccgcgtcgacggcccttngtgccactagntctttcattcttcccccccatcaatcagtgaactttttagcctactcaaagctttgctccaatgcataggatttatgattgtggggatttccagataatataaatattcaacatgaatattttaaattaaggcatgagacatttttcctaactgagcatagccatgaacctctcacgtctgttcctctgtgtcagtttgtancactgaatacagcagccctcctaaaagtccaggcagtgcacaggtcttgacatgatgaagtgacgtgttgctatggtgattttgcagctggccaaatagtcactggttgattttacccagcaggagatttttgcaaaaatttcctgggtgagagtgaaatcaaactcctattttgnttctcctctgcaagctgnagttaagatggattaatgagtacttttagattaattaactctgaagagaaaatgggagaaaagtgaggaaggttgttggcagaagtcattgctggaatccttctgaagggagtactgacttcacttgcaaagacnagagactanaagacaatgaagttaaacttggcctgtctctcatatgatagatgctgagagtcaggntcagggaaatttaattctgtcatacgcatatnggattatgtggtcatggatttgttggcactaaccngcctntaatcagnataagaaaagtgttttggtaganaaagaaaattatggcccagaaaaacctggaanacttggaaaaaatgntngggggccttgggtggtggtctnaaaanaccccctggggatntttaaaccaaaantgaagaagggaaaaatntttccccntntttttnttttttgcccccttgggattggnttttntttcc

SEQ ID NO: 740 - DNA, 739 bp, Homo sapiens
  misc_feature (1)...(739): n=A,T,C or G
gntgtcnaaaaagcaggctggtaccggtccggaattcgcggccgcgtcgacggcccttggtgccactagttctttcattcttccccnccatcaatcagtgaactttttagcctactcaaagctttgctccaatgcataggatttatgattgtggggatttccagataatataaatattcaacatgaatattttaaattaaggcatgagacatttttcctaactgagcatagccatgaacctctcacgtctgttcctctgtgncagtttgtagcactgaatacagcagccctcctaaaagtccaggcagtgcacaggtcttgacatgatgaagtgacgtgttgctatggtgattttgcagctggccaaatagtcactggttgattttacccagcaggagatttttgcaaaaatttcctgggtgagagtgaaatcaaactcctattttgtttctcctctgcaagctgnagttaanatggattaatgagtacttttagattaattaactctgaagagaaaatgggagaaaagngaggaaggttgttggcagaagtcattgctggaatccttctgaagggagtactgacttcacttgcaaagacaagagactanaagacaatgaagttaaacttggcctgtctntcatatgatagatgcttgagagtacaggntcagggaaattttaattctgncatacgcatattggattatgtgggtcatggctttgtttggcncctaacc

SEQ ID NO: 741 - DNA, 1171 bp, Homo sapiens
  misc_feature (1)...(1171): n=A,T,C or G
gccttgnggtgacactatagaacatgtttgtacaaaaaagcaggctggtaccggtccggaattcgcggccgcgtcgacggcccttnntgccactagttctttcattcttcccccccatcaatcagtgaactttttagcctactcaaagctttgctccaatgcataggatttatgattgtggggatttccagataatataaatattcaacatgaatattttaaattaaggcatgagacatttttcctaactgagcatagccatgaacctctcacgtctgttcctctgtgtcagtttgtagcactgaatacagcagccctcctaaaagtccaggcagtgcacaggtcttgacatgatgaagtgacgtgttgctatggtgattttgcagctggccaaatagtcactggttgattttacccagcaggagatttttgcaaaaatttcctgggtgagagtgaaatcaaactcctattttgtttctcctctgcaagctgtagttaagaagggattaatggagtactttttaagaattaaattaacctcttgaaagaagaaaaaatgggggaagaaaaaaagtggaagggaaaagggnttggttttgggccnaaaaaaaagttccaantttnggcnttggggaaaaattccccnttttccttggnaaaaggggggnaaggttaanccttgggaacctttttccnnccttttnggcccaaaaggggaacccanggggaaagaacctttaggnaaaggaaacccatttgggaangggtttnaaaaccnttngggcccccgggccctcctccaanaagggaaaaaaaaaggcctggaaaangtaccagggtttcangggnaaaanttaaaattcttggccaatancnccataattgggaattatgggggggccatgggcttttggtttgggcncttaaccccgcnttttaaattcaaannaaaaaaaagnggtttggaaaannaaanaaaaaaaattnaanggncccnaaaaaaaaccctggaaaacctttggaaaaaaattngnnggggggccntttggttgggggggtttnaaaaaaccccctngggggttttttaagcccaaaagggggggaggggnaaaanggtncccttnttttttttttnngccccccttggggaatggnttanttcanggggccc

SEQ ID NO: 742 - DNA, 739 bp, Homo sapiens; identical to SEQ ID NO: 740
  misc_feature (1)...(739): n=A,T,C or G

SEQ ID NO: 743 - DNA, 610 bp, Homo sapiens
  misc_feature (1)...(610): n=A,T,C or G
ctgtccttatttctttagcaaaaatttcccaagagaagaattgctgggataatgcacatttaaatttttgatagacattcccaaatattatacctgtttttgagacctttaattcctgttgtcaaattgccctatatatggagtaataaacacgatttaaagaaatgaggactaaaaaaagattatatataacccaacataaaggcaacctcttaggcgttgacagaaactgacaactttttatctgtgggtgcgatccattataagtaacctgagcaccttattttttctttttaaactctaggtaggatacccgaggtccacaaatttttcataagaaatattttttctctgccctatgagattttaaaaaatattatactgcttcaattgcatcaaaagaaatggaccctaatatctatgatgaaggatttggagttagaagacctgagtttcaattttggcatggctgtttgtctagctctgngatcttggacaggtcaattgacttggcttaatcttctcatccatttagnggagacagcaccactattcacaggactattgncngaattaccagacaatagcataggngaaaatataangcctt

SEQ ID NO: 744 - DNA, 127 bp, Homo sapiens
  misc_feature (1)...(127): n=A,T,C or G
ttnacctccctggaccgggccccccttccccgggcggntcccccgggctgcaggaattctgcacgagggagagagagttngagagagagagagagagagagagagagagagagananagagagagag

SEQ ID NO: 745 - DNA, 458 bp, Homo sapiens
  misc_feature (1)...(458): n=A,T,C or G
gatatcccgggattcgcggccgcgtcgacgtggcctctagtttgtcctggtccaaagcagggaagctgggctacgtcctgcccaggtcagccttaggttaagggctgcctgggggagggaacttcctgggccttcgggtctctgtgcactggggtggctcctgtggcccagaatgccctggagaagggtcctactggaagcgaaggtgcagggcagcagggcctgaggcgcaggagctggtggaggctcccagcacaggtcgccgccccagtcacatcactgctgatggtggggggacttggggagtttcccccgagaatgggaggtctcacagtccccgtgctgcaatgctgtcggtgcactgngncngcaatgtgctcatggncacttgctttttctctgtggccccggccgatttatccagcanngcacccctcttctnctctccgganaaagcc

SEQ ID NO: 746 - DNA, 893 bp, Homo sapiens
  misc_feature (1)...(893): n=A,T,C or G
aagcaggctggtaccggtccggaattcgcggccgcgtcgacgtggggagttagctctctggaccccgtcatagagtaagtcatcgatagagcatttgcttgatggggacttccagaaggccanngaaagtcctgccgacttcctggggaagcccatccgcacgtggggtgagggtccccanatggaagcagctgtgtatgcagggagggggcagaggctgctgccaatgggcatgtcccttacctgaaagggccacctctccaggtgacatgtcctgggggagccggggccgtctgctccggccagaggcgctcagctcaggccacaccaggcagggcacctcccaacctggacaggtggggaccaaggtggccttggacaaaactctctgtgtttgccaagcacccaatcggacacagagagtcaaccacaccccagtcacatggtgtccacacngcaggggtcaaggaggcccggcccctccccctcagacgtccctgggcctctgggagtcagcaaggacgaggacggcattgcccttcgagacaggaagggagtgacctcctcccggcggcatccaggctcngcttctccggagaggagagggggctacttgctggataaancggccggggccacagagaaaaagcaaggtgaccatgagcaccttgcaaacacagtgcacccaccagcatttnagcaccngggactgtgaagacctcccatttcttcggggggaaacncgcccaangttccccccaccntcactagtgnattgtgacctgggggncgggccgacccctgtngcttgggnnagccctccncccaggtttctnnggcngcccnttaanggnccctngnttggccccttggccncctttncgcttttccca

SEQ ID NO: 747 - DNA, 738 bp, Homo sapiens
  misc_feature (1)...(738): n=A,T,C or G
gatatcccgggaattcgcggccgcgtcnacgaagcacagacctgngccctgctctcatggggcagactgccatttgtcattnattactgaaggaaagggatcctcagtttgcttgtggacatttcaaatttgaggtgagagttggataagtaagaataaagctgctcttcaaagagatgaatatagaaaaagaaacaagatacagncttggcagtaaggctgggaggaaggggaaaaggtaataaagaatgaaagagtgagaaatgtgagcaggagctgaacacagaaaagttcagngacagaagcanaaggagggaagaagggaggagggtccctttcacagaggctcacgaggatgctttatgngtgccatgcagtccatgttcaggatgtctgcttcttanctctctacttttctaatanaaatttggatacttactgatcctacatatgtaacagggagagaaggtgaatttcaaagcantaaattgaaaaattgttcacaatttcattttttaaaaaaagggagctaacagaagaagaggttaatgtggtaattataggatgnctcttgcgacacatgaatgnatctggtatcatctgagtgggaggggagctgtcttcctgacccaaaaggatcctttcgttanccngnacttangtcccaaaacctcaccaccttggagaaatnatttccttttgggggtntcattaaanccttttggnccccgcaaaagc

SEQ ID NO: 748 - DNA, 647 bp, Homo sapiens
  misc_feature (1)...(647): n=A,T,C or G
ctntgtggcggtggctgtctcatttgggtggactttttgggtcgtaggaacctggtatngaggtcgagagtaagacgggctattagtagtcgcatcggagttatttgtgaaaacctggttagggcctctgtctccgctgcgctcgcctaaattggtatggctcgacttggaaacacggttctaacacgcgttgttagcgcccttgctagcatgtgaaggacactggccctaccaagaaagattcgagtcgctccttccggtatcgttcacggaggcgatatttactcttcttactacggttacttcgagattgtctgtgaagtttaagactactaaaaagagtattaagcctatcgggaattagctagatcgacacgctaaaaccaagggcaatcggcggaaatatagaggcaccaataatagggcctacagaaggcccgagggttagactcacgtttaataccggccacgggagaaataaaaagataaagtatacatcgtttagcggtcctcggaagccttcggctttaatgccaaggagtcggaagcatcgtcggcgagtaataaactccatcgcgccgagactatctacgacgccctccttaanatccgtaaattactcccggaaagagtatttaggcggctct

SEQ ID NO: 749 - DNA, 642 bp, Homo sapiens
  misc_feature (1)...(642): n=A,T,C or G
ctntgtggcggtggntgtctcatttgggtggactttttgggtcgtaggaacctggtatgcaggtccgcggagcgtgggctctcgtcgtggatgttgggggttggtgtggtgccggttgtttttggttctgttgagcgtagtgtgtttgaaggttagcgttcgtgtcttgcttgtggtttggtgtttagggcgggtggggaggttgttgtgtagctgttgtatgtcatattgttggtgttgctgccctgtgctgtttgtccttggttattgtggttgttaccccgcctgtgtggaagtgttgtggcagggcgggaatttaagtgggagagttgtgggacccgtggttgttgttacgttgctgcttttgtcgtgggcggtggcggcgcgtctgataattagaattggatacggagtgtataatacttctagtaaatggggacctagtgcttgacttcccggaatagggatctatgcgaagtccttaggatagtctttgataagtttaacgcccacgaccctaaaattatacacgattagacgcataacgactcctccaggaaagataaagaatctcacatatagaacgggaccccatacacgtcggataggaaacaagagaactaattttngttaaaaagactt

SEQ ID NO: 750 - DNA, 639 bp, Homo sapiens
  misc_feature (1)...(639): n=A,T,C or G
tttgtggcggtggtgtctcatttgggtggatttttgggtcgtaggtaacctggtatngaggtatagatgccgattggtcccgacgagcgtcacgataaattcggtagtttcgccctttttagaaggcgctagtactcggaacttcacttcatctcggtagtttactttggcgtatatagccttctccctcgaagactagccgtcacattcgttccctaggaatcgtttctgcccctaagaatccgagagcgagatcccgaaactagaggaaccttagaagagtcgtatttccacaaggaccccacagtcattccgggaaaatccctaggaccatacggttaggattcccccggaacccggagcaaagctcatgatttcccacaccgcgagagcgcctataaccctatcccatttcttcgggttatcgaggatattacgatcaagccgagagaaccgctagaaccgctttcttcgctttctcacggaacctataagtagaaagagaaactcaggtcttaagggggcgcttcggctaacgaaacttctacttacgaagagagtatctagacattaagtcataaaaatccactacgcacctcgtgtacgatatcatcgggagcggttcatagacggtgtccg

SEQ ID NO: 751 - DNA, 637 bp, Homo sapiens
  misc_feature (1)...(637): n=A,T,C or G
cttttgtggcggnggtgtctcatttgggtggatttttgggtcgtaggnaacctggtatngaggcagctctgagcccccccccccccccccccccccnccccccccccctaggnggttgggaanacggtggatacctaaatcgagtgngttcattaaaagtagttgattacnccctaaaataanaanagggcttcgtcggganaaatcggtaagganaagtctttntggcatcataanaatactggctcgggtcctaanatntttaaggnggtcnccgagggtnttcataccgataanaaacgttttcctatcggcaacgggcttacctgagggnggacttctcncggngcggngattnanacgaanacgtagaggattnccgntacttnttganatcacncgtatcatacttgtaagcataattntcctgaaaagtgttataanaatacgcncgcatattcgctttttcgtcctagggatgcttaaatggcgatactgctatagcgggtgagcgttggttctcgagnaanaaagcgtgtcctaatgcgtctaaggntttaaggncgttggtttaaaaatanccttagaaacctcgaggcggatactggtttntttttaacgaaacaaagcaccccnn

SEQ ID NO: 752 - DNA, 644 bp, Homo sapiens
  misc_feature (1)...(644): n=A,T,C or G
tntgtggcggtggtgctcatttgggtggatttttgggtcgtaggaacctggtatgaggtcttgcgagttgttggtgtgtcctgtcgttcggtggttcccttttgagttgagtttgtcctttgaggttgttagctgctgttcgtttgtgttcgtgtagtgctttgggttgagagggttatggtggtggttacggtgtattgtcgcccgtggtcgcggggttggggtggtcgtcggttttgtggttcatagtagtcttctgcgttcggtggtgcgggtttgggtgagtagtttcgttcttggatgtcccattgacccgccataatctaagtaagggttagtagaaacctctccccgatagacacaaccgtcgtccactaaagacctcgcctctgatttttaaaaggacccgaaaaacatcccttcaacggaaaaaacggaaaaaaagtcagcgaattcaaagaagccacgggagagaaaaaagaactaaagttagtccgtcattatatgtctcctcggaggaggaagcggcggtggcggaaaatgaggcggtaagaaagacgacctctatcggcggcttangccctaaaagggcgataccttacgggatgataaggaccctaggacgcctccttctcggatcgtcc

SEQ ID NO: 753 - DNA, 635 bp, Homo sapiens
  misc_feature (1)...(635): n=A,T,C or G
ctttgtggcggtggtgctcatttgggtggatttttgggtcgtaggaacctggtatgagggaatcagctcgacccccccccccccccccctccgaagcagagcccaacccaaagtccaccgactacccgagtaaactctcggagggtagaataagaaggagtaggtcctagccaatagaagtagttccgagccgttaggacagcggacggaacattnaagaaagagcctatattagggaggaagtaacgttcctctttcggagctctttaaggggtagtcccagaacaagggaagaggacccgtcggctattgcccgtcgatacgggctctcacggngagcctaggttcgaggatagggccgctcgtaaaattatacggtttccgagaaacgcttccgtagaccgggtcctaaatcgtccggagtattnggagagggatccttcggaccctagggacagagagaggagaacggaggttacaggaggagaacgtntcctcnctagttttctttangtcgaaaaatttcttaccgatagggttcctagggtcggngaatttacggttcgaaaaacggtagtncctaanggntgntattnggggtagtatcgggtcgtttacaantcgtccgtcttntg

SEQ ID NO: 754 - DNA, 721 bp, Homo sapiens
  misc_feature (1)...(721): n=A,T,C or G
accggattngttnctgagcgcgtgactgctaataaaaaagatggantgccatctttttttttnccttgctttatatatccagcagcaaaacaaaattgttctgcngggctataaaatttggcttgtgagtcntgtacacaactcaggagtgtgacacagctaccagctttcctcctaactctcaagggaagaaaattcaagttctgtctaggctcactctgtaaagtgggaaacttgctggttttgtaggctttttttccccttctttccctctctcagcttctccctgcttctcagaanatggagttgtgatgcctgcaacttaccaaatttatctatgaatcagattccagtgggagacccctaaagcagagggagaataaggagttctccccatgatggaaaatatccaaagacaaggtttcatggagcaaagaattctggctagatttggtttgtaagtggatccctccccactgcgtgtacactttatctgtctctttgcttcttccccaccctctttcccagctctctctctgtctctctcttgntcccctgacccttttttcttcccantgcatacttttttntttcccttttttaatcttctatantcttaancctaccaangggccctcntgannaatttntcacccctgaataggggattctntangccctgagaatttcnttatcanaaaaatatttttttaaagcatta

SEQ ID NO: 755 - DNA, 721 bp, Homo sapiens; identical to SEQ ID NO: 754
  misc_feature (1)...(721): n=A,T,C or G

SEQ ID NO: 756 - DNA, 873 bp, Homo sapiens
  misc_feature (1)...(873): n=A,T,C or G
ggaagaatacagtaagtttgcaaattaaaatttctctatttttctgttatttattcatttggaaactgtcagcctgtctctttcactttgggcaagtgaaagcaaagacgtccagtcctatcagcaattaggctgaaagtcaacgccaagctggcgggcaagggctggtctgagtagaggttccctaggcaggcaagagagagactcccactcgatactcccagctcggcaactgcctgaatgccaatgagcactcattataacccgccctattttataggatttaattttacacttcaggcttaatcagtctgaaagttaaactgacagtgttaagttacggaatcaatgacatttaggctttatgactttgtagctgaatatctatgggctatatttccattctaacagtgatatcctgttccagaatctcattctttggtgatggcactttctagtggagcagtcatggtaacagtccacacccattaccatgtgggtgctttacagcatactgacggaaggactgaggagccaccggagcaggagttcctctcagggaggacgctgacacttccacagctgcctangtatgggcacctgatgccaacgaanaacccaaagcgctctcccttccagatggaagctgccccacactgggctgacagcatctggagctgctctggctcaaatcccggaatcgcacanctcctancgggggcgtttanagatcctcngggccagctaccgaccacttttgacaagggncttaggagcgataactagnctggcgcgttacacncggatggaacgtcttggacttgagacctcttggggganatggcncccccaaataanttgggaaaantnggg

SEQ ID NO: 757 - DNA, 782 bp, Homo sapiens
  misc_feature (1)...(782): n=A,T,C or G
ggcccctcgagggatactctagagcggccgccgactagtgagctcgtcgacgatatcccgggatttgagaccaggagacagctccagatgctgtcagcccagtgctgggggcaggcttccatctgtgaagtggagaggcgctttgggcttcttcgttggcatcaggtgcccatacctagggcagctgtggaagtgtcagcgtcctccctgagaggaactcctgctccggtggctcctcagtccttccgtcagtatgctgtaaagcacccacatggtaatgggtgnggactggtaccatgactgntcccttaaaaggtggccttcccnaagaaaggagaattcttggacnagggatttcacttgnttagaaatgggaaaaattacccattagaattttcgnttccaaggcntnaagncctaaaaggcctttgattcccgaaccttaaccctgggcagttaacctttcaaacgggataaaccctganggggaaaatnaaatcctttaaaaaagggggggtttnaaggagggctctttggctttcaggcanttgccaacctgggaaattcanaggggaagtntttttttttgcctgcctagggaacctttacttaaacnaacccttgnccccccatttggggttgactttcancctaattgctgaaaggaccgggccgnttttgntttcctttgncccaaaggnaaanaaacgggtgccanttcccangggattanttcccgaaaatttggnnaatttttntttgnaactttttgggttttttcc

SEQ ID NO: 758 - DNA, 647 bp, Homo sapiens
  misc_feature (1)...(647): n=A,T,C or G
ntttgtggcggtggtgtctcatttgggtggactttttgggtcgtaggaacctggtatngagggaagagcgccgtcggtccgagtacagtatggagtagtatagtcttcgcgccttctcgggcggcggggctattctctccaaaggcagaggtccctagtcgacctcgctcccctaggttaggaacagccgtcgaatattttaggttcgtcgaggctttcttccgagctctacgcctaagtagctccgcgagcaaagtatcggtcattttcccctatccatcactcccctaagtacgcctcattattccggaaggcaagaggccagcattcctccttagagtagagggtaggtacctccgtcgcgtgccgcgaaagggcagagcttcgtgtcttccctccgcagcagcttaacggtctacgtaggcgttctcgatcttttcacgggaatcggggtccgggagggcggcggaaaacgtcgacgtctcggtcaccgtcaccgccccgaacaactagcggctttccgctttcaactgaggaaccccgcacccctcattagcgcttacgaaatcggggangtgattgcgccaattcgttagccttcgataattattctctattagcggtcctatctcgcgctttcgatttat

SEQ ID NO: 759 - DNA, 657 bp, Homo sapiens
  misc_feature (1)...(657): n=A,T,C or G
ctttgtggcggtggtgtctcatttgggtggactttttgggtcgtaggaacctggtatngagggctctatagaaagcctcttgtctttagatacgggctttctggtccttcgttctggaagtgtagtagtaggtactgcgggaaggcgaagagtcctttcaaggacgatttacttaagttggcttattctatagttccttcgggacataaggtcggtacgatctatactgcgtgggaagctgataggttgggacttaaggcgaataagaaggaggcggcggaggtcgcgattaccgcagagatattatttacggcggccgcgggtaccgcgggtcatgcggaaattttctgaggttcttggattcctaagatcgctcccgtcgagtatactagcgacgaacgtaagagtgccctcacaagaaccggtacaaactcaagaagaagttcccattaagcatcgtaagaaacggtaggacgaggacggtaagaagtaatcggagaaaggatcctagtngttacgaagaagcatcgttnagctactttgcgctaccgtttatatttagacgtgttccgtccttctccgtgtttanaaaaaaggtttattccgacgggagacttaggcgaatggagggttccgcggttganaatcggancgggg

SEQ ID NO: 760 - DNA, 644 bp, Homo sapiens
  misc_feature (1)...(644): n=A,T,C or G
ctttgtggcggtggtgtctcatttgggtggactttttgggtcgtaggaacctggtatgnaggaaaagaagtaagcctcgaagcctatctccgaccgtatttatttcgcagaagacggaactacggacgtcgttaaccccgagtagcccccgtaagaaaggactaaagcgaatggaaaagtcgggaattccggcggaggggcggcgattactgaaaggagtaagagtaagactattgcgatacttgaggcgttccctcttaaaaggcacccgaaacactctattaaaaaacacccgaagaagaacaactcatgcgatcggccgtgtgcagccgtcaatagtaaagagagccatgaaccatgccatccttagaccaattaggatgaagaagaggaggaagatgaggaccaaaccctacccactcggaaaaccccgcacgagcctccgaacaaaatccgggaattaaaacggcggcccacttccgcactctcgtagcgcggaccgaatagaaaaccggaaactacagctaaagggtcctttccggcctgttatctacccacccgcaatccgatcctccccccccctcgtccaaaaaccctaacctctgcggcaacattagagcagaaggagagggcgatcccttgan

SEQ ID NO: 761 - DNA, 647 bp, Homo sapiens
  misc_feature (1)...(647): n=A,T,C or G
ctttgtggcggtggtgtctcatttgggtggactttttgggtcgtaggaacctggtatngaggcgggtactctctgggataatcggtataagtgttgtaaaattgggggtaagagaaagtttcattataagaagtggaagcacgagccggggtgtttagtcgttaatattaagaccggtttttgttgtacttatatagcttgcgcgtggggaggcaataagaaacattgcgtttcgaggccggatgcggggaaccctcttcggggtctagagcgccgcatctgcaaaataaggactactgacgccgctcataacgtactcaacaatgagtcggcctgcattaagatttcggcgaagaaccgtactgcgtctactgatagtatattgcattgatagcggcatgagctttatcacgtgtcgttttcgggttgtaagaagggagttaagtcgatcttcgaggaagaagagaccccaaataaaaaatgactcaaaaaaacctagaagaaacacgacgaaaggaaaaagaacgttaaaactagtagctcttcggangagtagccttagtagggtaagtcctccgtgcgtactgtcctaaggtttggatagcgcggttgaatagacggtcacgcgtcagaaggtaaaaanccgg

SEQ ID NO: 762 - DNA, 628 bp, Homo sapiens
  misc_feature (1)...(628): n=A,T,C or G
cattgtgttggggtcactgagcccacttttttccagattttttgtaaaattgtttcgcattgtgttccctttattcgcttgtattaatatttgcgtagtggattaaacaaatacttggtgttgactgtcagtcttagaggactgactagaagtagttttcatttggggctcaggaaatacctactttatatttctagctaattaggaaagtcatttttcagttaggttggtgttttggttcaggcactcgctagctagatgacctaacatgctacttaatttctgagtgtttgtgtccatccctgtaggattgttgcggggttaaatgaaattgtgtatatttgtaaagcatttacctcagtgcccagactgtgacagagtagattattaggcttgctcttatttctgtgattaaatttagtgtcagattagcaacctatagctacttctaaagctgctgctgctttctttgtttagggttaggaagaaacatgctggacagtttgccaaatgagagttacatgatgtggcttgtgggaacattctaacttggaacttgcccatttccaggactttgnggttcanagatttttggggatagatgtaagggttaaaaaaaacngaaaac

SEQ ID NO: 763 - DNA, 147 bp, Homo sapiens
  misc_feature (1)...(147): n=A,T,C or G
cattgtgttggggcagagataaataattcctctgaaaagtgttttattggaatttcaaatgaaaagctaactggataacttacagcatgtttctgccaataatctcttanaacaggcctcttttttttatgcacaccaccttcnggc

SEQ ID NO: 764 - DNA, 146 bp, Homo sapiens
  misc_feature (1)...(146): n=A,T,C or G
cattgtgttgggtatgttttttgaaggcaggtggacaggatttgctgatgggtaaatggcagagttagggggactgttagaacagagaaaganatcatggggttgggtttgagtctgatgnnnaactggtgccgnntgctcagtat

SEQ ID NO: 765 - DNA, 129 bp, Homo sapiens
  misc_feature (1)...(129): n=A,T,C or G
tncncgattcgntnctagcgtntacactnatgtcttggtaccgagctcggatccactagtccagtgtgggnggaattccattgtgttggggcaggaggngctttgngtacngtgcggctgnagaggcgg

SEQ ID NO: 766 - DNA, 175 bp, Homo sapiens
  misc_feature (1)...(175): n=A,T,C or G
cattgtgttgggcctagtccgaatacttttagtaacttcagacagatctcctcatctctttctggggcttggnttttctcctttgtanaatgatgcctttctgtggttttgtcatttctaacattctgtgngtgatgaggtgtatattcganganctctatcnccanagtactct

SEQ ID NO: 767 - DNA, 602 bp, Homo sapiens
  misc_feature (1)...(602): n=A,T,C or G
nnntttaaaanctgtnctccccgcggtggcggccgctctagaactagtggatcctttccacctggtttgttttcagtgtttaatcctattagtatcagcaggatataggtcaggatatcaggtgcagaacctgtggaatcagccaatttggcttgctcatttactttaataaggtcccataatgagtgagagtacaaagttcaagccctgttgagggtctgcattaaactctcagaagtatttagagtgtgccaggagccgcgaaggtctggttcgggtggtggcgggaactgtattagagtgctaggcacggcgcgacaaagtctgtccaacccaaaacggtgctgaggcgttgggtgtgagctccagtactcagaaaagcatctcagcaggtactcaacagatcctcaggggcttgggggcccagcactggcagtgagggcatgaaagacataaaagggcactacctgtgggtattttctgttctccaaggaggaagtagcaaaaattaggacgctggaatatcctatgttgtagcaatcccagaacaactgatgctcaacaaataccacacaaaacaaattttttaaaatttaatctta

SEQ ID NO: 768 - DNA, 671 bp, Homo sapiens
  misc_feature (1)...(671): n=A,T,C or G
tccaccgcggtggcggccgctctagactagtggatccactagtccagtgtgggtgggaattcgcggcncgcgtcgacaaaaatactgctaaagtaatatttttatagatgactatttgccttggggccaggaaaagcagctggagttattcacttagtaccatttttacatactaactttgccttttccatgcttgcttgatgcggcttgcagcactgaagaacagtttcaattgctagccaaccagagagcatgatcaaaccaaacaagttccctgtttcaggaaaaacaggttttaggtaactgaagggttaccagttactgattccacaatcttctctgtaaaanatttctgcctattatgcagactgggcggctttaaanntggtaaaactatnaaatacccatacaatattttaanggggccccnttatnaagcttttcaggccttcccctttccatagcattggtgggatacaagaaacctttaaacagcaacnagctatcnaggcccaaaaggaaagtaattntgattttttanagattccgnaacgaaaaaatggctgggttcaaatacnaccttctttttaaaatggnttccttattaaacnttttttttttttaattttaccccatggtcntgatnttngngcttccgcccanaaaatngn

SEQ ID NO: 769 - DNA, 877 bp, Homo sapiens
  misc_feature (1)...(877): n=A,T,C or G
aaagctggagctccccgcggtggcggccgctctagaactagtggatccactagtccanngngggggaattcgcggccgcgtcgacctctatacctttgntcatgcagcttcctctgactgggtttgttcttcacttggctaacccctcttttacttaagcacaccttgaacattccctccttccccatttccccgcagngcccctaatggacatacttctgaataacacaggtggtattccttccttgttggaacctcctggaggaagagacagatgattaacaaatccttccatcaacccctttgaccatgacatcaacagtgctccaaattatggggtaccgtattagcctatgtctatcttgatcagaatccttacctcggtgtattgaaattatctatttcgtgcctgcctctttaaagtcagggtttgccttatctattgtctaacaccatgcagtaggtaacatgcagtaggaaacatggcattaaattatttgggttcaaatcccagttatggtgtgtaaatgcctaccaggccgtgaggcacctgctaagcaggttgcacgcatcatttgaattcacaccacccttttgcaatagaacagataggcaacagaggctcatttgggctaaaggatttgatggaggggaagtgccaggattcccaccaaggcctcanggcccaggtccanggaccatgtctgttgtgacaactggagtgcatttcatatcccctnctctgnggggnaaggtccctcncgnggagaacnnttaaaacaatcatntctngggggnttaatgcttcttnccccagtgtggtncactgcngccacgagtcccanccactagtcccangtctgtcatgaaccanccc

SEQ ID NO: 770 - DNA, 874 bp, Homo sapiens
  misc_feature (1)...(874): n=A,T,C or G
ctggnctccccgcggtggcggccgctctagaactagtggatccactagtccagtgtggtggaattcgcggccgcgtcgaccttttcaaaggttaacttatttaattatcacannngcaacccgatgagtaggtaacagtattttactgataggtaatctaaagaaggaggctaaataaattgcccaatttcgaacagtgagaggaagaattaggattgaaacacatatagtggcttcagaatctgtaaccctcacgatgccactactacttctttcagaataccctttgcctatctattctgttcctatgtcatcaaattatacttactttaaaaagtatttgtctttattatttttaaaaaaacacagggaagtatttctgatcaggggcagtattggttctgaaagacaagccagtgtttttgagggtttctcccttgccagtttttctatgctgggttattcaagtcctaagaattgtgtagctattacagaaccgctttagcaaatgtgttccattaatcaaggtgatttataacaaaatttcatccaagtttggagtgctctgaaaacatagccaaaatgttcgcagggtctacccctctcgtgtgtcccttttttttagctatttcagaagcacactggtgcaatattttacgaaatgagtttcttccccttacctctgcatcctctaagaaaaaatcattgntgttttatgaanatgaanatcctgctatttcatatcttgattggagctgcttaattaaatgaccattttnaaatttgttttgattccnngcaaaaaaagtttnttnttggatgtagggggctcnnaaagnccaaaaccccccaaaatttttnnttgggaacccna

SEQ ID NO: 771 - DNA, 156 bp, Homo sapiens
  misc_feature (1)...(156): n=A,T,C or G
ttaaaaanctggnctccccgcggtggcggccgctctagaactagtggatccactagtccagtgtggtggaattcgcggccgcgtcgaccgcgagcggtcgcccttttttttttttttttnngtttttttgaanaattcattgggtatttattattc

SEQ ID NO: 772 - DNA, 586 bp, Homo sapiens
  misc_feature (1)...(586): n=A,T,C or G
ncaanctggnctccaccgcggtggcggccgctctagactagtggatccactagtccagtgtggtggaattcgcggccgcgtcgatcacaaagtgctcacaagtccngnatttattttatctccagatatgaaacttacccccagctatggtcttctatttgttatttaatttctaggccaattttttccacttgaatgtcagtattttaattcaaagtcaccttgtccaaataccaagtcatcaacttaccctcaaattatatcctcattcagaaaatctacatctattaatggtagctattttatccctgccccctgctttttctttttatatttaattaatttgntcatccagcaaatgcttattgagcaggtattgtaggctaaacaattctanactttaaggggacacagnttgcaaaacaaaatcctgccttgnatggatacttatgnnatggngggatacagacaatcaacataatgangngcatcatatataatggttagnanaatgataagggnttttgggaaaaaaatgcacccanccaananggattgggaagtgganggganggtcangggangg

SEQ ID NO: 773 - DNA, 2983 bp, Homo sapiens
agagatagagtcttccctggcattgcaggagagaatctgaagggatgatggatgcatcaaaagagctgcaagttctccacattgacttcttgaatcaggacaacgccgtttctcaccacacatgggagttccaaacgagcagtcctgtgttccggcgaggacaggtgtttcacctgcggctggtgctgaaccagcccctacaatcctaccaccaactgaaactggaattcagcacagggccgaatcctagcatcgccaaacacaccctggtggtgctcgacccgaggacgccctcagaccactacaactggcaggcaacccttcaaaatgagtctggcaaagaggtcacagtggctgtcaccagttcccccaatgccatcctgggcaagtaccaactaaacgtgaaaactggaaaccacatccttaagtctgaagaaaacatcctataccttctcttcaacccatggtgtaaagaggacatggttttcatgcctgatgaggacgagcgcaaagagtacatcctcaatgacacgggctgccattacgtgggggctgccagaagtatcaaatgcaaaccctggaactttggtcagtttgagaaaaatgtcctggactgctgcatttccctgctgactgagagctccctcaagcccacagataggagggaccccgtgctggtgtgcagggccatgtgtgctatgatgagctttgagaaaggccagggcgtgctcattgggaattggactggggactatgaaggtggcacagccccatacaagtggacaggcagtgccccgatcctgcagcagtactacaacacgaagcaggctgtgtgctttggccagtgctgggtgtttgctgggatcctgactacagtgctgagagcgttgggcatcccagcacgcagtgtgacaggcttcgattcagctcacgacacagaaaggaacctcacggtggacacctatgtgaatgagaatggcaagaaaatcaccagtatgacccacgactctgtctggaatttccatgtgtggacggatgcctggatgaagcgaccggatctgcccaagggctacgacggctggcaggctgtggacgcaacgccgcaggagcgaagccagggtgtcttctgctgtgggccatcaccactgaccgccatccgcaaaggtgacatctttattgtctatgacaccagattcgtcttctcagaagtgaatggtgacaggctcatctggttggtgaagatggtgaatgggcaggaggagttacacgtaatttcaatggagaccacaagcatcgggaaaaacatcagcaccaaggcagtgggccaagacaggcggagagatatcacctatgagtacaagtatccagaaggctcctctgaggagaggcaggtcatggatcatgccttcctccttctcagttctgagagggagcacagacgacctgtaaaagagaactttcttcacatgtcggtacaatcagatgatgtgctgctgggaaactctgttaatttcaccgtgattcttaaaaggaagaccgctgccctacagaatgtcaacatcttgggctcctttgaactacagttgtacactggcaagaagatggcaaaactgtgtgacctcaataagacctcgcagatccaaggtcaagtatcagaagtgactctgaccttggactccaagacctacatcaacagcctggctatattagatgatgagccagttatcagaggtttcatcattgcggaaattgtggagtctaaggaaatcatggcctctgaagtattcacgtctttccagtaccctgagttctctatagagttgcctaacacaggcagaattggccagctacttgtctgcaattgtatcttcaagaataccctggccatccctttgactgacgtcaagttctctttggaaagcctgggcatctcctcactacagacctctgaccatgggacggtgcagcctggtgagaccatccaatcccaaataaaatgcaccccaataaaaactggacccaagaaatttatcgtcaagttaagttccaaacaagtgaaagagattaatgctcagaagattgttctcatcaccaagtagccttgtctgatgctgtggagccttagttgagatttcagcatttcctaccttgtgcttagctttcagattatggatgattaaatttgatgacttatatgagggcagattcaagagccagcaggtcaaaaaggccaacacaaccataagcagccagacccacaaggccaggtcctgtgctatcacagggtcacctcttttacagttagaaacaccagccgaggccacagaatcccatccctttcctgagtcatggcctcaaaaatcagggccaccattgtctcaattcaaatccatagatttcgaagccacagagtctctccctggagcagcagactatgggcagcccagtgctgccacctgctgacgacccttgagaagctgccatatcttcaggccatgggttcaccagccctgaaggcacctgtcaactggagtgctctctcagcactgggatgggcctgatagaagtgcattctcctcctattgcctccattctcctctctctatccctgaaatccaggaagtccctctcctggtgctccaagcagtttgaagcccaatctgcaaggacatttctcaagggccatgtggttttgcagacaaccctgtcctcaggcctgaactcaccatagagacccatgtcagcaaacggtgaccagcaaatcctcttcccttattctaaagctgccccttgggagactccagggagaaggcattgcttcctccctggtgtgaactctttctttggtattccatccactatcctggcaactcaaggctgcttctgttaactgaagcctgctccttcttgttctgccctccagagatttgctcaaatgatcaataagctttaaattaaactctacttcaagaaaaaaaaaccg

SEQ ID NO: 774 - DNA, 3064 bp, Homo sapiens
aattctaaaaatgcttttgcaagcttgcatgcctgcaggtgcagcggccgccagtgtgatggatatctgcagaattcggcttgcgctcagctggaattccgcagagatagagtcttccctggcattgcaggagagaatctgaagggatgatggatgcatcaaaagagctgcaagttctccacattgacttcttgaatcaggacaacgccgtttctcaccacacatgggagttccaaacgagcagtcctgtgttccggcgaggacaggtgtttcacctgcggctggtgctgaaccagcccctacaatcctaccaccaactgaaactggaattcagcacagggccgaatcctagcatcgccaaacacaccctggtggtgctcgacccgaggacgccctcagaccactacaactggcaggcaacccttcaaaatgagtctggcaaagaggtcacagtggctgtcaccagttcccccaatgccatcctgggcaagtaccaactaaacgtgaaaactggaaaccacatccttaagtctgaagaaaacatcctataccttctcttcaacccatggtgtaaagaggacatggttttcatgcctgatgaggacgagcgcaaagagtacatcctcaatgacacgggctgccattacgtgggggctgccagaagtatcaaatgcaaaccctggaactttggtcagtttgagaaaaatgtcctggactgctgcatttccctgctgactgagagctccctcaagcccacagataggagggaccccgtgctggtgtgcagggccatgtgtgctatgatgagctttgagaaaggccagggcgtgctcattgggaattggactggggactacgaaggtggcacagccccatacaagtggacaggcagtgccccgatcctgcagcagtactacaacacgaagcaggctgtgtgctttggccagtgctgggtgtttgctgggatcctgactacagtgctgagagcgttgggcatcccagcacgcagtgtgacaggcttcgattcagctcacgacacagaaaggaacctcacggtggacacctatgtgaatgagaatggcgagaaaatcaccagtatgacccacgactctgtctggaatttccatgtgtggacggatgcctggatgaagcgaccctacgacggctggcaggctgtggacgcaacgccgcaggagcgaagccagggtgtcttctgctgtgggccatcaccactgaccgccatccgcaaaggtgacatctttattgtctatgacaccagattcgtcttctcagaagtgaatggtgacaggctcatctggttggtgaagatggtgaatgggcaggaggagttacacgtaatttcaatggagaccacaagcatcgggaaaaacatcagcaccaaggcagtgggccaagacaggcggagagatatcacctatgagtacaagtatccagaaggctcctctgaggagaggcaggtcatggatcatgccttcctccttctcagttctgagagggagcacagacagcctgtaaaagagaactttcttcacatgtcggtacaatcagatgatgtgctgctgggaaactctgttaatttcaccgtgattcttaaaaggaagaccgctgccctacagaatgtcaacatcttgggctcctttgaactacagttgtacactggcaagaagatggcaaaactgtgtgacctcaataagacctcgcagatccaaggtcaagtatcagaagtgactctgaccttggactccaagacctacatcaacagcctggctatattagatgatgagccagttatcagaggtttcatcattgcggaaattgtggagtctaaggaaatcatggcctctgaagtattcacgtcaaaccagtaccctgagttctctatagagttgcctaacacaggcagaattggccagctacttgtctgcaattgtatcttcaagaataccctggccatccctttgactgacgtcaagttctctttggaaagcctgggcatctcctcactacagacctctgaccatgggacggtgcagcctggtgagaccatccaatcccaaataaaatgcaccccaataaaaactggacccaagaaatttatcgtcaagttaagttccaaacaagtgaaagagattaatgctcagaagattgttctcatcaccaagtagccttgtctgatgctgtggagccttagttgagatttcagcatttcctaccttgtgcttagctttcagattatggatgattaaatttgatgacttatatgagggcagattcaagagccagcaggtcaaaaaggccaacacaaccataagcagccagacccacaaggccaggtcctgtgctatcacagggtcacctcttttacagttagaaacaccagccgaggccacagaatcccatccctttcctgagtcatggcctcaaaaatcagggccaccattgtctcaattcaaatccatagatttcgaagccacagagctcttccctggagcagcagactatgggcagcccagtgctgccacctgctgacgacccttgagaagctgccatatcttcaggccatgggttcaccagccctgaaggcacctgtcaactggagtgctctctcagcactgggatgggcctgatagaagtgcattctcctcctattgcctccattctcctctctctatccctgaaatccaggaagtccctctcctggtgctccaagcagtttgaagcccaatctgcaaggacatttctcaagggccatgtggttttgcagacaaccctgtcctcaggcctgaactcaccatagagacccatgtcagcaaacggtgaccagcaaatcctcttcccttattctaaagctgccccttgggagactccagggagaaggcattgcttcctccctggtgtgaactctttctttggtattccatccactatcctggcaactcaaggctgcttctgttaactgaagcctgctccttcttgttctgccctccagagatttgctcaaatgatcaataagctttaaattaaaccggaatccgcggaattc

SEQ ID NO: 775 - protein, 684 aa, Homo sapiens
MMDASKELQVLHIDFLNQDNAVSHHTWEFQTSSPVFRRGQVFHLRLVLNQPLQSYHQLKLEFSTGPNPSIAKHTLVVLDPRTPSDHYNWQATLQNESGKEVTVAVTSSPNAILGKYQLNVKTGNHILKSEENILYLLFNPWCKEDMVFMPDEDERKEYILNDTGCHYVGAARSIKCKPWNFGQFEKNVLDCCISLLTESSLKPTDRRDPVLVCRAMCAMMSFEKGQGVLIGNWTGDYEGGTAPYKWTGSAPILQQYYNTKQAVCFGQCWVFAGILTTVLRALGIPARSVTGFDSAHDTERNLTVDTYVNENGKKITSMTHDSVWNFHVWTDAWMKRPDLPKGYDGWQAVDATPQERSQGVFCCGPSPLTAIRKGDIFIVYDTRFVFSEVNGDRLIWLVKMVNGQEELHVISMETTSIGKNISTKAVGQDRRRDITYEYKYPEGSSEERQVMDHAFLLLSSEREHRRPVKENFLHMSVQSDDVLLGNSVNFTVILKRKTAALQNVNILGSFELQLYTGKKMAKLCDLNKTSQIQGQVSEVTLTLDSKTYINSLAILDDEPVIRGFIIAEIVESKEIMASEVFTSFQYPEFSIELPNTGRIGQLLVCNCIFKNTLAIPLTDVKFSLESLGISSLQTSDHGTVQPGETIQSQIKCTPIKTGPKKFIVKLSSKQVKEINAQKIVLITK

SEQ ID NO: 776 - protein, 679 aa, Homo sapiens
MMDASKELQVLHIDFLNQDNAVSHHTWEFQTSSPVFRRGQVFHLRLVLNQPLQSYHQLKLEFSTGPNPSIAKHTLVVLDPRTPSDHYNWQATLQNESGKEVTVAVTSSPNAILGKYQLNVKTGNHILKSEENILYLLFNPWCKEDMVFMPDEDERKEYILNDTGCHYVGAARSIKCKPWNFGQFEKNVLDCCISLLTESSLKPTDRRDPVLVCRAMCAMMSFEKGQGVLIGNWTGDYEGGTAPYKWTGSAPILQQYYNTKQAVCFGQCWVFAGILTTVLRALGIPARSVTGFDSAHDTERNLTVDTYVNENGEKITSMTHDSVWNFHVWTDAWMKRPYDGWQAVDATPQERSQGVFCCGPSPLTAIRKGDIFIVYDTRFVFSEVNGDRLIWLVKMVNGQEELHVISMETTSIGKNISTKAVGQDRRRDITYEYKYPEGSSEERQVMDHAFLLLSSEREHRQPVKENFLHMSVQSDDVLLGNSVNFTVILKRKTAALQNVNILGSFELQLYTGKKMAKLCDLNKTSQIQGQVSEVTLTLDSKTYINSLAILDDEPVIRGFIIAEIVESKEIMASEVFTSNQYPEFSIELPNTGRIGQLLVCNCIFKNTLAIPLTDVKFSLESLGISSLQTSDHGTVQPGETIQSQIKCTPIKTGPKKFIVKLSSKQVKEINAQKIVLITK

SEQ ID NO: 777 - DNA, 5668 bp, Homo sapiens
gtcacttaggaaaaggtgtcctttcgggcagccgggctcagcatgaggaacagaaggaatgacactctggacagcacccggaccctgtactccagcgcgtctcggagcacagacttgtcttacagtgaaagcgacttggtgaattttattcaagcaaattttaagaaacgagaatgtgtcttctttaccaaagattccaaggccacggagaatgtgtgcaagtgtggctatgcccagagccagcacatggaaggcacccagatcaaccaaagtgagaaatggaactacaagaaacacaccaaggaatttcctaccgacgcctttggggatattcagtttgagacactggggaagaaagggaagtatatacgtctgtcctgcgacacggacgcggaaatcctttacgagctgctgacccagcactggcacctgaaaacacccaacctggtcatttctgtgaccgggggcgccaagaacttcgccctgaagccgcgcatgcgcaagatcttcagccggctcatctacatcgcgcagtccaaaggtgcttggattctcacgggaggcacccattatggcctgacgaagtacatcggggaggtggtgagagataacaccatcagcaggagttcagaggagaatattgtggccattggcatagcagcttggggcatggtctccaaccgggacaccctcatcaggaattgcgatgctgagggctattttttagcccagtaccttatggatgacttcacaagggatccactgtatatcctggacaacaaccacacacatttgctgctcgtggacaatggctgtcatggacatcccactgtcgaagcaaagctccggaatcagctagagaagcatatctctgagcgcactattcaagattccaactatggtggcaagatccccattgtgtgttttgcccaaggaggtggaaaagagactttgaaagccatcaatacctccatcaaaaataaaattccttgtgtggtggtggaaggctcgggccggatcgctgatgtgatcgctagcctggtggaggtggaggatgccccgacatcttctgccgtcaaggagaagctggtgcgctttttaccccgcacggtgtcccggctgtctgaggaggagactgagagttggatcaaatggctcaaagaaattctcgaatgttctcacctattaacagttattaaaatggaagaagctggggatgaaattgtgagcaatgccatctcctacgctctatacaaagccttcagcaccagtgagcaagacaaggataactggaatgggcagctgaagcttctgctggagtggaaccagctggacttagccaatgatgagattttcaccaatgaccgccgatgggagtctgctgaccttcaagaagtcatgtttacggctctcataaaggacagacccaagtttgtccgcctctttctggagaatggcttgaacctacggaagtttctcacccatgatgtcctcactgaactcttctccaaccacttcagcacgcttgtgtaccggaatctgcagatcgccaagaattcctataatgatgccctcctcacgtttgtctggaaactggttgcgaacttccgaagaggcttccggaaggaagacagaaatggccgggacgagatggacatagaactccacgacgtgtctcctattactcggcaccccctgcaagctctcttcatctgggccattcttcagaataagaaggaactctccaaagtcatttgggagcagaccaggggctgcactctggcagccctgggagccagcaagcttctgaagactctggccaaagtgaagaacgacatcaatgctgctggggagtccgaggagctggctaatgagtacgagacccgggctgttgagctgttcactgagtgttacagcagcgatgaagacttggcagaacagctgctggtctattcctgtgaagcttggggtggaagcaactgtctggagctggcggtggaggccacagaccagcatttcaccgcccagcctggggtccagaattttctttctaagcaatggtatggagagatttcccgagacaccaagaactggaagattatcctgtgtctgtttattatacccttggtgggctgtggctttgtatcatttaggaagaaacctgtcgacaagcacaagaagctgctttggtactatgtggcgttcttcacctcccccttcgtggtcttctcctggaatgtggtcttctacatcgccttcctcctgctgtttgcctacgtgctgctcatggatttccattcggtgccacacccccccgagctggtcctgtactcgctggtctttgtcctcttctgtgatgaagtgagacagtggtacgtaaatggggtgaattattttactgacctgtggaatgtgatggacacgctggggcttttttacttcatagcaggaattgtatttcggctccactcttctaataaaagctctttgtattctggacgagtcattttctgtctggactacattattttcactctaagattgatccacatttttactgtaagcagaaacttaggacccaagattataatgctgcagaggatgctgatcgatgtgttcttcttcctgttcctctttgcggtgtggatggtggcctttggcgtggccaggcaagggatccttaggcagaatgagcagcgctggaggtggatattccgttcggtcatctacgagccctacctggccatgttcggccaggtgcccagtgacgtggatggtaccacgtatgactttgcccactgcaccttcactgggaatgagtccaagccactgtgtgtggagctggatgagcacaacctgccccggttccccgagtggatcaccatccccctggtgtgcatctacatgttatccaccaacatcctgctggtcaacctgctggtcgccatgtttggctacacggtgggcaccgtccaggagaacaatgaccaggtctggaagttccagaggtacttcctggtgcaggagtactgcagccgcctcaatatccccttccccttcatcgtcttcgcttacttctacatggtggtgaagaagtgcttcaagtgttgctgcaaggagaaaaacatggagtcttctgtctgctgtttcaaaaatgaagacaatgagactctggcatgggagggtgtcatgaaggaaaactaccttgtcaagatcaacacaaaagccaacgacacctcagaggaaatgaggcatcgatttagacaactggatacaaagcttaatgatctcaagggtcttctgaaagagattgctaataaaatcaaataaaactgtatgaaactctaatggagaaaaatctaattatagcaagatcatattaaggaatgctgatgaacaattttgctatcgactactaaatgagagattttcagacccctgggtacatggtggatgattttaaatcaccctagtgtgctgagaccttgagaataaagtgtgtgattggtttcatacttgaagacggatataaaggaagaatatttcctttatgtgtttctccagaatggtgcctgtttctctctgtgtctcaatgcctgggactggaggttgatagtttaagtgtgttcttaccgcctcctttttcctttaatcttatttttgatgaacacatatataggagaacatctatcctatgaataagaacctggtcatgctttactcctgtattgttattttgttcatttccaattgattctctacttttcccttttttgtattatgtgactaattagttggcatattgttaaaagtctctcaaattaggccagattctaaaacatgctgcagcaagaggaccccgctctcttcaggaaaagtgttttcatttctcaggatgcttcttacctgtcagaggaggtgacaaggcagtctcttgctctcttggactcaccaggctcctattgaaggaaccacccccattcctaaatatgtgaaaagtcgcccaaaatgcaaccttgaaaggcactactgactttgttcttattggatactcctcttatttattatttttccattaaaaataatagctggctattatagaaaatttagaccatacagagatgtagaaagaacataaattgtccccattaccttaaggtaatcactgctaacaatttctggatggtttttcaagtctattttttttctatgtatgtctcaattctctttcaaaattttacagaatgttatcatactacatatatactttttatgtaagctttttcacttagtattttatcaaatatgtttttattatattcatagccttcttaaacattatatcaataattgcataataggcaacctctagcgattaccataattttgctcattgaaggctatctccagttgatcattgggatgagcatctttgtgcatgaatcctattgctgtatttgggaaaattttccaaggttagattccaataaatatctatttattattaaatattaaaatatcgatttattattaaaaccatttataaggctttttcataaatgtatagcaaataggaattattaacttgagcataagatatgagatacatgaacctgaactattaaaataaaatattatatttaaccctagtttaagaagaagtcaatatgcttatttaaatattatggatggtgggcagatcacttgaggtcaggagttcgagaccagcctggccaacatggcaaaaccacatctctactaaaaataaaaaaattagctgggtgtggtggtgcactcctgtaatcccagctactcagaaggctgaggtacaagaattgctggaacctgggaggcggaggttgcagtgaaccaagattgcaccactgcactccagccggggtgacagagtgagactccgactgaaaataaataaataaataaataaataaataaataaataaatattatggatggtgaagggaatggtatagaattggagagattatcttactgaacacctgtagtcccagctttctctggaagtggtggtatttgagcaggatgtgcacaaggcaattgaaatgcccataattagtttctcagctttgaatacactataaactcagtggctgaaggaggaaattttagaaggaagctactaaaagatctaatttgaaaaactacaaaagcattaactaaaaaagtttattttccttttgtctgggcagtagtgaaaataactactcacaacattcactatgtttgcaaggaattaacacaaataaaagatgcctttttacttaaacgccaagacagaaaacttgcccaatactgagaagcaacttgcattagagagggaactgttaaatgttttcaacccagttcatctggtggatgtttttgcaggttactctgagaattttgcttatgaaaaatcattatttttagtgtagttcacaataatgtattgaacatacttctaatcaaaggtgctatgtccttgtgtatggtactaaatgtgtcctgtgtacttttgcacaactgagaatcctgcggcttggtttaatgagtgtgttcatgaaataaataatggaggaattgtcaaaaaaaaaaaaaaaaaaaaaaaaaaaaaaaaaaaaaaaaaaaaaaaaaaaaaaaaaaaaaaaaa

SEQ ID NO: 778 - protein, 1095 aa, Homo sapiens
MRNRRNDTLDSTRTLYSSASRSTDLSYSESDLVNFIQANFKKRECVFFTKDSKATENVCKCGYAQSQHMEGTQINQSEKWNYKKHTKEFPTDAFGDIQFETLGKKGKYIRLSCDTDAEILYELLTQHWHLKTPNLVISVTGGAKNFALKPRMRKIFSRLIYIAQSKGAWILTGGTHYGLTKYIGEVVRDNTISRSSEENIVAIGIAAWGMVSNRDTLIRNCDAEGYFLAQYLMDDFTRDPLYILDNNHTHLLLVDNGCHGHPTVEAKLRNQLEKHISERTIQDSNYGGKIPIVCFAQGGGKETLKAINTSIKNKIPCVVVEGSGRIADVIASLVEVEDAPTSSAVKEKLVRFLPRTVSRLSEEETESWIKWLKEILECSHLLTVIKMEEAGDEIVSNAISYALYKAFSTSEQDKDNWNGQLKLLLEWNQLDLANDEIFTNDRRWESADLQEVMFTALIKDRPKFVRLFLENGLNLRKFLTHDVLTELFSNHFSTLVYRNLQIAKNSYNDALLTFVWKLVANFRRGFRKEDRNGRDEMDIELHDVSPITRHPLQALFIWAILQNKKELSKVIWEQTRGCTLAALGASKLLKTLAKVKNDINAAGESEELANEYETRAVELFTECYSSDEDLAEQLLVYSCEAWGGSNCLELAVEATDQHFTAQPGVQNFLSKQWYGEISRDTKNWKIILCLFIIPLVGCGFVSFRKKPVDKHKKLLWYYVAFFTSPFVVFSWNVVFYIAFLLLFAYVLLMDFHSVPHPPELVLYSLVFVLFCDEVRQWYVNGVNYFTDLWNVMDTLGLFYFIAGIVFRLHSSNKSSLYSGRVIFCLDYIIFTLRLIHIFTVSRNLGPKIIMLQRMLIDVFFFLFLFAVWMVAFGVARQGILRQNEQRWRWIFRSVIYEPYLAMFGQVPSDVDGTTYDFAHCTFTGNESKPLCVELDEHNLPRFPEWITIPLVCIYMLSTNILLVNLLVAMFGYTVGTVQENNDQVWKFQRYFLVQEYCSRLNIPFPFIVFAYFYMVVKKCFKCCCKEKNMESSVCCFKNEDNETLAWEGVMKENYLVKINTKANDTSEEMRHRFRQLDTKLNDLKGLLKEIANKIK

SEQ ID NO: 779 - DNA, 3639 bp, Homo sapiens
gattacgcaagctatttaggtgacactatagaatwctcagcttgcatcaagcttggtaccgagctcggatccctagtaacggccgccagtgtgctggaattcgcccttgcagccgggctcagcatgaggaacagaaggaatgacactctggacagcacccggaccctgtactccagcgcgtctcggagcacagacttgtcttacagtgaaagcgacttggtgaattttattcaagcaaattttaagaaacgagaatgtgtcttctttaccaaagattccaaggccacggagaatgtgtgcaagtgtggctatgcccagagccagcacatggaaggcacccagatcaaccaaagtgagaaatggaactacaagaaacacaccaaggaatttcctaccgacgcctttggggatattcagtttgagacactggggaagaaagggaagtatatacgtctgtcctgcgacacggacgcggaaatcctttacgagctgctgacccagcactggcacctgaaaacacccaacctggtcatttctgtgaccgggggcgccaagaacttcgccctgaagccgcgcatgcgcaagatcttcagccggctcatctacatcgcgcagtccaaaggtgcttggattctcacgggaggcacccattatggcctgatgaagtacatcggggaggtggtgagagataacaccatcagcaggagttcagaggagaatattgtggccattggcatagcagcttggggcatggtctccaaccgggacaccctcatcaggaattgcgatgctgagggctattttttagcccagtaccttatggatgacttcacaagagatccactgtatatcctggacaacaaccacacacatttgctgctcgtggacaatggctgtcatggacatcccactgtcgaagcaaagctccggaatcagctagagaagtatatctctgagcgcactattcaagattccaactatggtggcaagatccccattgtgtgttttgcccaaggaggtggaaaagagactttgaaagccatcaatacctccatcaaaaataaaattccttgtgtggtggtggaaggctcgggccagatcgctgatgtgatcgctagcctggtggaggtggaggatgccctgacatcttctgccgtcaaggagaagctggtgcgctttttaccccgcacggtgtcccggctgcctgaggaggagactgagagttggatcaaatggctcaaagaaattctcgaatgttctcacctattaacagttattaaaatggaagaagctggggatgaaattgtgagcaatgccatctcctacgctctatacaaagccttcagcaccagtgagcaagacaaggataactggaatgggcagctgaagcttctgctggagtggaaccagctggacttagccaatgatgagattttcaccaatgaccgccgatgggagtctgctgaccttcaagaagtcatgtttacggctctcataaaggacagacccaagtttgtccgcctctttctggagaatggcttgaacctacggaagtttctcacccatgatgtcctcactgaactcttctccaaccacttcagcacgcttgtgtaccggaatctgcagatcgccaagaattcctataatgatgccctcctcacgtttgtctggaaactggttgcgaacttccgaagaggcttccggaaggaagacagaaatggccgggacgagatggacatagaactccacgacgtgtctcctattactcggcaccccctgcaagctctcttcatctgggccattcttcagaataagaaggaactctccaaagtcatttgggagcagaccaggggctgcactctggcagccctgggagccagcaagcttctgaagactctggccaaagtgaagaacgacatcaatgctgctggggagtccgaggagctggctaatgagtacgagacccgggctgttgagctgttcactgagtgttacagcagcgatgaagacttggcagaacagctgctggtctattcctgtgaagcttggggtggaagcaactgtctggagctggcggtggaggccacagaccagcatttcatcgcccagcctggggtccagaattttctttctaagcaatggtatggagagatttcccgagacaccaagaactggaagattatcctgtgtctgtttattatacccttggtgggctgtggctttgtatcatttaggaagaaacctgtcgacaagcacaagaagctgctttggtactatgtggcgttcttcacctcccccttcgtggtcttctcctggaatgtggtcttctacatcgccttcctcctgctgtttgcctacgtgctgctcatggatttccattcggtgccacacccccccgagctggtcctgtactcgctggtctttgtcctcttctgtgatgaagtgagacagtggtacgtaaatggggtgaattattttactgacctgtggaatgtgatggacacgctggggcttttttacttcatagcaggaattgtatttcggctccactcttctaataaaagctctttgtattctggacgagtcattttctgtctggactacattattttcactctaagattgatccacatttttactgtaagcagaaacttaggacccaagattataatgctgcagaggatgctgatcgatgtgttcttcttcctgttcctctttgcggwgtggatggtggcctttggcgtggccaggcaagggatccttaggcagaatgagcagcgctggaggtggatattccgttcggtcatctacgagccctacctggccatgttcggccaggtgcccagtgacgtggatggtaccacgtatgactttgcccactgcaccttcactgggaatgagtccaagccactgtgtgtggagctggatgagcacaacctgccccggttccccgagtggatcaccatccccctggtgtgcatctacatgttatccaccaacatcctgctggtcaacctgctggtcgccatgtttggctacacggtgggcaccgtccaggagaacaatgaccaggtctggaagttccagaggtacttcctggtgcaggagtactgcagccgcctcaatatccccttccccttcatcgtcttcgcttacttctacatggtggtgaagaagtgcttcaagtgttgctgcaaggagaaaaacatggagtcttctgtctgctgtttcaaaaatgaagacaatgagactctggcatgggagggtgtcatgaaggaaaactaccttgtcaagatcaacacaaaagccaacgacacctcagaggaaatgaggcatcgatttagacaactggatacaaagcttaatgatctcaagggtcttctgaaagagattgctaataaaatcaaataaaactgtatgaactctaatggagaaaaatctaattatagcaagatcatattaaggaatgctgatgaacaattttgctatcgactactaaatgagagattttcagacccctgggtacatggtggatgattttaaatcaccctagtgtgctgagaccttgagaataaagtgtgaagggcgaattctgcagatatccatcacactggcggccgctcgagcatgcatctagag

SEQ ID NO: 780 - protein, 1095 aa, Homo sapiens
  VARIANT (1)...(1095): Xaa = Any Amino Acid
MRNRRNDTLDSTRTLYSSASRSTDLSYSESDLVNFIQANFKKRECVFFTKDSKATENVCKCGYAQSQHMEGTQINQSEKWNYKKHTKEFPTDAFGDIQFETLGKKGKYIRLSCDTDAEILYELLTQHWHLKTPNLVISVTGGAKNFALKPRMRKIFSRLIYIAQSKGAWILTGGTHYGLMKYIGEVVRDNTISRSSEENIVAIGIAAWGMVSNRDTLIRNCDAEGYFLAQYLMDDFTRDPLYILDNNHTHLLLVDNGCHGHPTVEAKLRNQLEKYISERTIQDSNYGGKIPIVCFAQGGGKETLKAINTSIKNKIPCVVVEGSGQIADVIASLVEVEDALTSSAVKEKLVRFLPRTVSRLPEEETESWIKWLKEILECSHLLTVIKMEEAGDEIVSNAISYALYKAFSTSEQDKDNWNGQLKLLLEWNQLDLANDEIFTNDRRWESADLQEVMFTALIKDRPKFVRLFLENGLNLRKFLTHDVLTELFSNHFSTLVYRNLQIAKNSYNDALLTFVWKLVANFRRGFRKEDRNGRDEMDIELHDVSPITRHPLQALFIWAILQNKKELSKVIWEQTRGCTLAALGASKLLKTLAKVKNDINAAGESEELANEYETRAVELFTECYSSDEDLAEQLLVYSCEAWGGSNCLELAVEATDQHFIAQPGVQNFLSKQWYGEISRDTKNWKIILCLFIIPLVGCGFVSFRKKPVDKHKKLLWYYVAFFTSPFVVFSWNVVFYIAFLLLFAYVLLMDFHSVPHPPELVLYSLVFVLFCDEVRQWYVNGVNYFTDLWNVMDTLGLFYFIAGIVFRLHSSNKSSLYSGRVIFCLDYIIFTLRLIHIFTVSRNLGPKIIMLQRMLIDVFFFLFLFAXWMVAFGVARQGILRQNEQRWRWIFRSVIYEPYLAMFGQVPSDVDGTTYDFAHCTFTGNESKPLCVELDEHNLPRFPEWITIPLVCIYMLSTNILLVNLLVAMFGYTVGTVQENNDQVWKFQRYFLVQEYCSRLNIPFPFIVFAYFYMVVKKCFKCCCKEKNMESSVCCFKNEDNETLAWEGVMKENYLVKINTKANDTSEEMRHRFRQLDTKLNDLKGLLKEIANKIK

SEQ ID NO: 781 - protein, 15 aa, Homo sapiens
RMPTVLQCVNVSVVS

SEQ ID NO: 782 - DNA, 45 bp, Homo sapiens
agaatgcctaccgtgctgcagtgcgtgaacgtgtcggtggtgtct

SEQ ID NO: 783 - DNA, 45 bp, Homo sapiens
gagccagggagccagatggtggaggccagcctctccgtacggcac

SEQ ID NO: 784 - DNA, 45 bp, Homo sapiens
gaggccgaccaagagccagggagccagatggtggaggccagcctc

SEQ ID NO: 785 - DNA, 45 bp, Homo sapiens
ggcctgcacagtcttgaggccgaccaagagccagggagccagatg

SEQ ID NO: 786 - DNA, 45 bp, Homo sapiens
tacaccatcgggctgggcctgcacagtcttgaggccgaccaagag

SEQ ID NO: 787 - DNA, 42 bp, Homo sapiens
ttccagaactcctacaccatcgggctgggcctgcacagtctt

SEQ ID NO: 788 - DNA, 45 bp, Homo sapiens
ctgtcagccgcacactgtttccagaactcctacaccatcgggctg

SEQ ID NO: 789 - DNA, 45 bp, Homo sapiens
catccgcagtgggtgctgtcagccgcacactgtttccagaactcc

SEQ ID NO: 790 - DNA, 45 bp, Homo sapiens
tcgggcgtcctggtgcatccgcagtgggtgctgtcagccgcacac

SEQ ID NO: 791 - DNA, 45 bp, Homo sapiens
aacgaattgttctgctcgggcgtcctggtgcatccgcagtgggtg

SEQ ID NO: 792 - DNA, 45 bp, Homo sapiens
gcactggtcatggaaaacgaattgttctgctcgggcgtcctggtg

SEQ ID NO: 793 - DNA, 51 bp, Homo sapiens
tcgcagccctggcaggcggcactggtcatggaaaacgaattgttctgctcg

SEQ ID NO: 794 - DNA, 45 bp, Homo sapiens
atcagcattgcttcgcagtgccctaccgcggggaactcttgcctc

SEQ ID NO: 795 - DNA, 45 bp, Homo sapiens
tccgtgtccgagtctgacaccatccggagcatcagcattgcttcg

SEQ ID NO: 796 - DNA, 45 bp, Homo sapiens
atcaagttggacgaatccgtgtccgagtctgacaccatccggagc

SEQ ID NO: 797 - DNA, 45 bp, Homo sapiens
aacgacctcatgctcatcaagttggacgaatccgtgtccgagtct

SEQ ID NO: 798 - DNA, 45 bp, Homo sapiens
agacccttgctcgctaacgacctcatgctcatcaagttggacgaa

SEQ ID NO: 799 - protein, 15 aa, Homo sapiens
EPGSQMVEASLSVRH

SEQ ID NO: 800 - protein, 15 aa, Homo sapiens
EADQEPGSQMVEASL

SEQ ID NO: 801 - protein, 15 aa, Homo sapiens
GLHSLEADQEPGSQM

SEQ ID NO: 802 - protein, 15 aa, Homo sapiens
YTIGLGLHSLEADQE

SEQ ID NO: 803 - protein, 14 aa, Homo sapiens
FQNSYTIGLGLHSL

SEQ ID NO: 804 - protein, 15 aa, Homo sapiens
LSAAHCFQNSYTIGL

SEQ ID NO: 805 - protein, 15 aa, Homo sapiens
HPQWVLSAAHCFQNS

SEQ ID NO: 806 - protein, 15 aa, Homo sapiens
SGVLVHPQWVLSAAH

SEQ ID NO: 807 - protein, 15 aa, Homo sapiens
NELFCSGVLVHPQWV

SEQ ID NO: 808 - protein, 15 aa, Homo sapiens
ALVMENELFCSGVLV

SEQ ID NO: 809 - protein, 17 aa, Homo sapiens
SQPWQAALVMENELFCS

SEQ ID NO: 810 - protein, 15 aa, Homo sapiens
ISIASQCPTAGNSCL

SEQ ID NO: 811 - protein, 15 aa, Homo sapiens
SVSESDTIRSISIAS

SEQ ID NO: 812 - protein, 15 aa, Homo sapiens
IKLDESVSESDTIRS

SEQ ID NO: 813 - protein, 15 aa, Homo sapiens
NDLMLIKLDESVSES

SEQ ID NO: 814 - protein, 15 aa, Homo sapiens
RPLLANDLMLIKLDE

SEQ ID NO: 815 - DNA, 35 bp, Artificial Sequence
  PCR primer
ggaccagcatatgaggaacagaaggaatgacactc

SEQ ID NO: 816 - DNA, 29 bp, Artificial Sequence
  PCR primer
ccgctcgagtccaccccaagcttcacagg

SEQ ID NO: 817 - DNA, 1959 bp, Homo sapiens
atgaggaacagaaggaatgacactctggacagcacccggaccctgtactccagcgcgtctcggagcacagacttgtcttacagtgaaagcgacttggtgaattttattcaagcaaattttaagaaacgagaatgtgtcttctttaccaaagattccaaggccacggagaatgtgtgcaagtgtggctatgcccagagccagcacatggaaggcacccagatcaaccaaagtgagaaatggaactacaagaaacacaccaaggaatttcctaccgacgcctttggggatattcagtttgagacactggggaagaaagggaagtatatacgtctgtcctgcgacacggacgcggaaatcctttacgagctgctgacccagcactggcacctgaaaacacccaacctggtcatttctgtgaccgggggcgccaagaacttcgccctgaagccgcgcatgcgcaagatcttcagccggctcatctacatcgcgcagtccaaaggtgcttggattctcacgggaggcacccattatggcctgatgaagtacatcggggaggtggtgagagataacaccatcagcaggagttcagaggagaatattgtggccattggcatagcagcttggggcatggtctccaaccgggacaccctcatcaggaattgcgatgctgagggctattttttagcccagtaccttatggatgacttcacaagagatccactgtatatcctggacaacaaccacacacatttgctgctcgtggacaatggctgtcatggacatcccactgtcgaagcaaagctccggaatcagctagagaagtatatctctgagcgcactattcaagattccaactatggtggcaagatccccattgtgtgttttgcccaaggaggtggaaaagagactttgaaagccatcaatacctccatcaaaaataaaattccttgtgtggtggtggaaggctcgggccagatcgctgatgtgatcgctagcctggtggaggtggaggatgccctgacatcttctgccgtcaaggagaagctggtgcgctttttaccccgcacggtgtcccggctgcctgaggaggagactgagagttggatcaaatggctcaaagaaattctcgaatgttctcacctattaacagttattaaaatggaagaagctggggatgaaattgtgagcaatgccatctcctacgctctatacaaagccttcagcaccagtgagcaagacaaggataactggaatgggcagctgaagcttctgctggagtggaaccagctggacttagccaatgatgagattttcaccaatgaccgccgatgggagtctgctgaccttcaagaagtcatgtttacggctctcataaaggacagacccaagtttgtccgcctctttctggagaatggcttgaacctacggaagtttctcacccatgatgtcctcactgaactcttctccaaccacttcagcacgcttgtgtaccggaatctgcagatcgccaagaattcctataatgatgccctcctcacgtttgtctggaaactggttgcgaacttccgaagaggcttccggaaggaagacagaaatggccgggacgagatggacatagaactccacgacgtgtctcctattactcggcaccccctgcaagctctcttcatctgggccattcttcagaataagaaggaactctccaaagtcatttgggagcagaccaggggctgcactctggcagccctgggagccagcaagcttctgaagactctggccaaagtgaagaacgacatcaatgctgctggggagtccgaggagctggctaatgagtacgagacccgggctgttgagctgttcactgagtgttacagcagcgatgaagacttggcagaacagctgctggtctattcctgtgaagcttggggtggactcgagcaccaccaccaccaccactga

SEQ ID NO: 818 - protein, 652 aa, Homo sapiens
MRNRRNDTLDSTRTLYSSASRSTDLSYSESDLVNFIQANFKKRECVFFTKDSKATENVCKCGYAQSQHMEGTQINQSEKWNYKKHTKEFPTDAFGDIQFETLGKKGKYIRLSCDTDAEILYELLTQHWHLKTPNLVISVTGGAKNFALKPRMRKIFSRLIYIAQSKGAWILTGGTHYGLMKYIGEVVRDNTISRSSEENIVAIGIAAWGMVSNRDTLIRNCDAEGYFLAQYLMDDFTRDPLYILDNNHTHLLLVDNGCHGHPTVEAKLRNQLEKYISERTIQDSNYGGKIPIVCFAQGGGKETLKAINTSIKNKIPCVVVEGSGQIADVIASLVEVEDALTSSAVKEKLVRFLPRTVSRLPEEETESWIKWLKEILECSHLLTVIKMEEAGDEIVSNAISYALYKAFSTSEQDKDNWNGQLKLLLEWNQLDLANDEIFTNDRRWESADLQEVMFTALIKDRPKFVRLFLENGLNLRKFLTHDVLTELFSNHFSTLVYRNLQIAKNSYNDALLTFVWKLVANFRRGFRKEDRNGRDEMDIELHDVSPITRHPLQALFIWAILQNKKELSKVIWEQTRGCTLAALGASKLLKTLAKVKNDINAAGESEELANEYETRAVELFTECYSSDEDLAEQLLVYSCEAWGGLEHHHHHH

SEQ ID NO: 819 - protein, 132 aa, Homo sapien
TAASDNFQLSQGGQGFAIPIGQAMAIAGQIRSGGGSPTVHIGPTAFLGLGVVDNNGNGARVQRVVGSAPAASLGISTGDVITAVDGAPINSATAMADALNGHHPGDVISVNWQTKSGGTRTGNVTLAEGPPA

SEQ ID NO: 820 - DNA, 36 bp, Artificial Sequence
  PCR primer
ggggaattcatgatccgggagaaatttgcccactgc

SEQ ID NO: 821 - DNA, 33 bp, Artificial Sequence
  PCR primer
gggctcgagtcaggagtttgagaccagcctggc

SEQ ID NO: 822 - DNA, 675 bp, Homo sapiens
atgcatcaccatcaccatcacacggccgcgtccgataacttccagctgtcccagggtgggcagggattcgccattccgatcgggcaggcgatggcgatcgcgggccagatcaagcttcccaccgttcatatcgggcctaccgccttcctcggcttgggtgttgtcgacaacaacggcaacggcgcacgagtccaacgcgtggtcgggagcgctccggcggcaagtctcggcatctccaccggcgacgtgatcaccgcggtcgacggcgctccgatcaactcggccaccgcgatggcggacgcgcttaacgggcatcatcccggtgacgtcatctcggtgacctggcaaaccaagtcgggcggcacgcgtacagggaacgtgacattggccgagggacccccggccgaattcatgatccgggagaaatttgcccactgcaccgtgctaaccattgcacacagattgaacaccattattgacagcgacaagataatggttttagattcaggaagactgaaagaatatgatgagccgtatgttttgctgcaaaataaagagagcctattttacaagatggtgcaacaactgggcaaggcagaagccgctgccctcactgaaacagcaaaacagagatggggtttcaccatgttggccaggctggtctcaaactcctga

SEQ ID NO: 823 - DNA, 291 bp, Homo sapiens
atggggatccgggagaaatttgcccactgcaccgtgctaaccattgcacacagattgaacaccattattgacagcgacaagataatggttttagattcaggaagactgaaagaatatgatgagccgtatgttttgctgcaaaataaagagagcctattttacaagatggtgcaacaactgggcaaggcagaagccgctgccctcactgaaacagcaaaacagagatggggtttcaccatgttggccaggctggtctcaaactccctcgagcaccaccaccaccaccactga

SEQ ID NO: 824 - DNA, 1074 bp, Homo sapiens
atgtcagccattgagagggtgtcagaggcaatcgtcagcatccgaagaatccagacctttttgctacttgatgagatatcacagcgcaaccgtcagctgccgtcagatggtaaaaagatggtgcatgtgcaggattttactgctttttgggataaggcatcagagaccccaactctacaaggcctttcctttactgtcagacctggcgaattgttagctgtggtcggccccgtgggagcagggaagtcatcactgttaagtgccgtgctcggggaattggccccaagtcacgggctggtcagcgtgcatggaagaattgcctatgtgtctcagcagccctgggtgttctcgggaactctgaggagtaatattttatttgggaagaaatacgaaaaggaacgatatgaaaaagtcataaaggcttgtgctctgaaaaaggatttacagctgttggaggatggtgatctgactgtgataggagatcggggaaccacgctgagtggagggcagaaagcacgggtaaaccttgcaagagcagtgtatcaagatgctgacatctatctcctggacgatcctctcagtgcagtagatgcggaagttagcagacacttgttcgaactgtgtatttgtcaaattttgcatgagaagatcacaattttagtgactcatcagttgcagtacctcaaagctgcaagtcagattctgatattgaaagatggtaaaatggtgcagaaggggacttacactgagttcctaaaatctggtatagattttggctcccttttaaagaaggataatgaggaaagtgaacaacctccagttccaggaactcccacactaaggaatcgtaccttctcagagtcttcggtttggtctcaacaatcttctagaccctccttgaaagatggtgctctggagagccaagatacagagaatgtcccagttacactatcagaggagaaccgttctgaaggaaaagttggttttcaggcctataagaattacttcagagctggtgctcactggattgtcttcattttccttattctcgagcaccaccaccaccaccactga

SEQ ID NO: 825 - protein, 224 aa, Homo sapiens
MHHHHHHTAASDNFQLSQGGQGFAIPIGQAMAIAGQIKLPTVHIGPTAFLGLGVVDNNGNGARVQRVVGSAPAASLGISTGDVITAVDGAPINSATAMADALNGHHPGDVISVTWQTKSGGTRTGNVTLAEGPPAEFMIREKFAHCTVLTIAHRLNTIIDSDKIMVLDSGRLKEYDEPYVLLQNKESLFYKMVQQLGKAEAAALTETAKQRWGFTMLARLVSNS

SEQ ID NO: 826 - protein, 357 aa, Homo sapiens
MSAIERVSEAIVSIRRIQTFLLLDEISQRNRQLPSDGKKMVHVQDFTAFWDKASETPTLQGLSFTVRPGELLAVVGPVGAGKSSLLSAVLGELAPSHGLVSVHGRIAYVSQQPWVFSGTLRSNILFGKKYEKERYEKVIKACALKKDLQLLEDGDLTVIGDRGTTLSGGQKARVNLARAVYQDADIYLLDDPLSAVDAEVSRHLFELCICQILHEKITILVTHQLQYLKAASQILILKDGKMVQKGTYTEFLKSGIDFGSLLKKDNEESEQPPVPGTPTLRNRTFSESSVWSQQSSRPSLKDGALESQDTENVPVTLSEENRSEGKVGFQAYKNYFRAGAHWIVFIFLILEHHHHHH

SEQ ID NO: 827 - protein, 96 aa, Homo sapiens
MGIREKFAHCTVLTIAHRLNTIIDSDKIMVLDSGRLKEYDEPYVLLQNKESLFYKMVQQLGKAEAAALTETAKQRWGFTMLARLVSNSLEHHHHHH

SEQ ID NO: 828 - DNA, 35 bp, Artificial Sequence
  PCR primer
cgcccatggggatccgggagaaatttgcccactgc

SEQ ID NO: 829 - DNA, 35 bp, Artificial Sequence
  PCR primer
cgcctcgagggagtttgagaccagcctggccaaca

SEQ ID NO: 830 - DNA, 38 bp, Artificial Sequence
  PCR primer
gcatggaccatatgtcagccattgagagggtgtcagag

SEQ ID NO: 831 - DNA, 34 bp, Artificial Sequence
  PCR primer
ccgctcgagaataaggaaaatgaagacaatccag

SEQ ID NO: 832 - DNA, 27 bp, Artificial Sequence
  PCR primer
gttgaattcatgcacgggccccaggtg

SEQ ID NO: 833 - DNA, 30 bp, Artificial Sequence
  PCR primer
cccctcgagtcactatggtctgcctcttga

SEQ ID NO: 834 - DNA, 915 bp, Homo sapiens
atgcatcaccatcaccatcacacggccgcgtccgataacttccagctgtcccagggtgggcagggattcgccattccgatcgggcaggcgatggcgatcgcgggccagatcaagcttcccaccgttcatatcgggcctaccgccttcctcggcttgggtgttgtcgacaacaacggcaacggcgcacgagtccaacgcgtggtcgggagcgctccggcggcaagtctcggcatctccaccggcgacgtgatcaccgcggtcgacggcgctccgatcaactcggccaccgcgatggcggacgcgcttaacgggcatcatcccggtgacgtcatctcggtgacctggcaaaccaagtcgggcggcacgcgtacagggaacgtgacattggccgagggacccccggccgaattcatgcacgggccccaggtgctggcacgctgctccgagtgtgcttgtcctgccttggctgccacctctgcgggggtgcgtctggagggggtggaccggccaccaaccttacccagtcaaggaagtggatggccatgttcccacagcctgagtggctgccacctgatggctgatggagcaaaggccttaggaaaagcagatggcccttggccctacctttttgttagaagaactgatgttccatgtcctgcagcgagtgaggttggtggctgtgcccccagctcctggcgcgccctcgcagaggtgactggttgctctttgggccctcttggccttgcccagcatgcacaagcctcagtgctactactgtgctacaaatggagccatataggggaaacgagcagccatctcaggagcaaggtgtatgctgcctttgggggctccagtccttgcctcaagggtcttatgtcactgtgggcttcttggttgtcaagaggcagaccatag

SEQ ID NO: 835 - protein, 304 aa, Homo sapiens [sequence omitted]

SEQ ID NO: 836 - DNA, 24 bp, Artificial Sequence
  PCR primer
cgaagtcacgtggaggccagcctc

SEQ ID NO: 837 - DNA, 29 bp, Artificial Sequence
  PCR primer
cctgaccgaattcattaactggcctggac

SEQ ID NO: 838 - protein, 166 aa, Homo sapiens
  VARIANT (1)...(166): Xaa = Any Amino Acid
MGHHHHHHVEASLSVRHPEYNRPLLANDLMLIKLDESVSESDTIRSISIASQCPTAGNSCLVSGWGLLANGRMPTVLQCVNVSVVSEEVCSKLYDPLYHPSMFCAGGGQXQXDSCNGDSGGPLICNGYLQGLVSFGKAPCGQVGVPGVYTNLCKFTEWIEKTVQAS

SEQ ID NO: 839 - DNA, 504 bp, Homo sapiens
  misc_feature (1)...(504): n = A,T,C or G
atgggccatcatcatcatcatcacgtggaggccagcctctccgtacggcacccagagtacaacagacccttgctcgctaacgacctcatgctcatcaagttggacgaatccgtgtccgagtctgacaccatccggagcatcagcattgcttcgcagtgccctaccgcggggaactcttgcctcgtttctggctggggtctgctggcgaacggcagaatgcctaccgtgctgcagtgcgtgaacgtgtcggtggtgtctgaggaggtctgcagtaagctctatgacccgctgtaccaccccagcatgttctgcgccggcggagggcaanaccagaangactcctgcaacggtgactctggggggcccctgatctgcaacgggtacttgcagggccttgtgtctttcggaaaagccccgtgtggccaagttggcgtgccaggtgtctacaccaacctctgcaaattcactgagtggatagagaaaaccgtccaggccagttaatga

SEQ ID NO: 840 - DNA, 21 bp, Artificial Sequence
  PCR primer
ctcagggttccggagccgcgg

SEQ ID NO: 841 - DNA, 35 bp, Artificial Sequence
  PCR primer
ctatagaattcattaccaaaaagctgggctccagc

SEQ ID NO: 842 - protein, 241 aa, Homo sapiens
MQHHHHHHLRVPEPRPGEAKAEGAAPPTPSKPLTSFLIQDILRDGAQRQGGRTSSQRQRDPEPEPEPEPEGGRSRAGAQNDQLSTGPRAAPEEAETLAETEPERHLGSYLLDSENTSGALPRLPQTPKQPQKRSRAAFSHTQVIELERKFSHQKYLSAPERAHLAKNLKLTETQVKIWFQNRRYKTKRKQLSSELGDLEKHSSLPALKEEAFSRASLVSVYNSYPYYPYLYCVGSWSPAFW

SEQ ID NO: 843 - DNA, 729 bp, Homo sapiens
atgcagcatcaccaccatcaccacctcagggttccggagccgcggcccggggaggcgaaagcggagggggccgcgccgccgaccccgtccaagccgctcacgtccttcctcatccaggacatcctgcgggacggcgcgcagcggcaaggcggccgcacgagcagccagagacagcgcgacccggagccggagccagagccagagccagagggaggacgcagccgcgccggggcgcagaacgaccagctgagcaccgggccccgcgccgcgccggatgaggccgagacgctggcagagaccgagccagaaaggcacttggggtcttatctgttggactctgaaaacacttcaggcgcccttccaaggcttccccaaacccctaagcagccgcagaagcgctcccgagctgccttctcccacactcaggtgatcgagttggagaggaagttcagccatcagaagtacctgtcggcccctgaacgggcccacctggccaagaacctcaagctcacggagacccaagtgaagatatggttccagaacagacgctataagactaagcgaaagcagctctcctcggagctgggagacttggagaagcactcctttttgccggccctgaaagaggaggccttctcccgggcctccctggtctccgtgtataacagctatccttactacccatacctgcactgcgtgggcagctggagcccagctttttggtaatga

SEQ ID NO: 844 - DNA, 27 bp, Artificial Sequence
  PCR primer
ctactaagcgctggagtgagggatcag

SEQ ID NO: 845 - DNA, 33 bp, Artificial Sequence
  PCR primer
catcgagaattcactactctctgactagatgtc

SEQ ID NO: 846 - protein, 161 aa, Homo sapiens [sequence omitted]

SEQ ID NO: 847 - DNA, 489 bp, Homo sapiens
atgcagcatcaccaccatcaccacgctggagtgagggatcaggggcagggcgcgagatggcctcacacagggaagagagggcccctcctgcagggcctcacctgggccacaggaggacactgcttttcctctgaggagtcaggagctgtggatggtgctggacagaagaaggacagggcctggctcaggtgtccagaggctgtcgctggcttccctttgggatcagactgcagggagggagggcggcagggttgtggggggagtgacgatgaggatgacctgggggtggctccaggccttgcccctgcctgggccctcacccagcctccctcacagtctcctggccctcagtctctcccctccactccatcctccatctggcctcagtgggtcattctgatcactgaactgaccatacccagccctgcccacggccctccatggctccccaatgccctggagaggggacatctagtcagagagtagtga

SEQ ID NO: 848 - protein, 132 aa, Homo sapiens; identical to SEQ ID NO: 819

SEQ ID NO: 849 - DNA, 31 bp, Artificial Sequence
  PCR primer
ggggaattcatcacctatgtgccgcctctgc

SEQ ID NO: 850 - DNA, 40 bp, Artificial Sequence
  PCR primer
gggctcgagtcactcgcccacgaaatccgtgtaaaacagc

SEQ ID NO: 851 - DNA, 1203 bp, Homo sapiens
atgcatcaccatcaccatcacacggccgcgtccgataacttccagctgtcccagggtgggcagggattcgccattccgatcgggcaggcgatggcgatcgcgggccagatcaagcttcccaccgttcatatcgggcctaccgccttcctcggcttgggtgttgtcgacaacaacggcaacggcgcacgagtccaacgcgtggtcgggagcgctccggcggcaagtctcggcatctccaccggcgacgtgatcaccgcggtcgacggcgctccgatcaactcggccaccgcgatggcggacgcgcttaacgggcatcatcccggtgacgtcatctcggtgacctggcaaaccaagtcgggcggcacgcgtacagggaacgtgacattggccgagggacccccggccgaattcatcacctatgtgccgcctctgctgctggaagtgggggtagaggagaagttcatgaccatggtgctgggcattggtccagtgctgggcctggtctgtgtcccgctcctaggctcagccagtgaccactggcgtggacgctatggccgccgccggcccttcatctgggcactgtccttgggcatcctgctgagcctctttctcatcccaagggccggctggctagcagggctgctgtgcccggatcccaggcccctggagctggcactgctcatcctgggcgtggggctgctggacttctgtggccaggtgtgcttcactccactggaggccctgctctctgacctcttccgggacccggaccactgtcgccaggcctactctgtctatgccttcatgatcagtcttgggggctgcctgggctacctcctgcctgccattgactgggacaccagtgccctggccccctacctgggcacccaggaggagtgcctctttggcctgctcaccctcatcttcctcacctgcgtagcagccacactgctggtggctgaggaggcagcgctgggccccaccgagccagcagaagggctgtcggccccctccttgtcgccccactgctgtccatgccgggcccgcttggctttccggaacctgggcgccctgcttccccggctgcaccagctgtgctgccgcatgccccgcaccctgcgccggctcttcgtggctgagctgtgcagctggatggcactcatgaccttcacgctgttttacacggatttcgtgggcgagtga

SEQ ID NO: 852 - protein, 400 aa, Homo sapiens [sequence omitted]

SEQ ID NO: 853 - protein, 20 aa, Homo sapiens
LLPPPPALCGASACDVSVRV

SEQ ID NO: 854 - DNA, 60 bp, Homo sapiens
ctgctcccacctccacccgcgctctgcggggcctctgcctgtgatgtctccgtacgtgtg

SEQ ID NO: 855 - protein, 10 aa, Homo sapiens
ASACDVSVRV

SEQ ID NO: 856 - DNA, 30 bp, Homo sapiens
gcctctgcctgtgatgtctccgtacgtgtg

SEQ ID NO: 857 - protein, 9 aa, Homo sapiens
ASACDVSVR

SEQ ID NO: 858 - protein, 9 aa, Homo sapiens
SACDVSVRV

SEQ ID NO: 859 - DNA, 27 bp, Homo sapiens
tctgcctgtgatgtctccgtacgtgtg

SEQ ID NO: 860 - protein, 19 aa, Homo sapiens
GIGPVLGLVCVPLLGSASD

SEQ ID NO: 861 - protein, 19 aa, Homo sapiens
VPPLLLEVGVEEKFMTMVL

SEQ ID NO: 862 - protein, 19 aa, Homo sapiens
MVQRLWVSRLLRHRKAQLL

SEQ ID NO: 863 - DNA, 57 bp, Homo sapiens
  misc_feature (1)...(57): n = A,T,C or G
ggnathggnccngtnytnggnytngtntgygtnccnytnytnggnwsngcnwsngay

SEQ ID NO: 864 - DNA, 57 bp, Homo sapiens
  misc_feature (1)...(57): n = A,T,C or G
gtnccnccnytnytnytngargtnggngtngargaraarttyatgacnatggtnytn

SEQ ID NO: 865 - DNA, 57 bp, Homo sapiens
  misc_feature (1)...(57): n = A,T,C or G
atggtncarmgnytntgggtnwsnmgnytnytnmgncaymgnaargcncarytnytn

SEQ ID NO: 866 - protein, 9 aa, Homo sapiens
VLQCVNVSV

SEQ ID NO: 867 - protein, 9 aa, Homo sapiens
RMPTVLQCV

SEQ ID NO: 868 - protein, 9 aa, Homo sapiens
NLCKFTEWI

SEQ ID NO: 869 - protein, 9 aa, Homo sapiens
MLIKLDESV

SEQ ID NO: 870 - protein, 9 aa, Homo sapiens
LLANDLMLI

SEQ ID NO: 871 - protein, 10 aa, Homo sapiens
LLANGRMPTV

SEQ ID NO: 872 - protein, 10 aa, Homo sapiens
LMLIKLDESV

SEQ ID NO: 873 - protein, 10 aa, Homo sapiens
VLQCVNVSVV

SEQ ID NO: 874 - protein, 10 aa, Homo sapiens
GLLANGRMPT

SEQ ID NO: 875 - protein, 10 aa, Homo sapiens
TVLQCVNVSV

SEQ ID NO: 876 - protein, 9 aa, Homo sapiens
GVLVHPQWV

SEQ ID NO: 877 - protein, 9 aa, Homo sapiens
VLVHPQWVL

SEQ ID NO: 878 - DNA, 1195 bp, Homo sapiens
ccgagactcacggtcaagctaaggcgaagagtgggtggctgaagccatactattttatagaattaatggaaagcagaaaagacatcacaaaccaagaagaactttggaaaatgaagcctaggagaaatttagaagaagacgattatttgcataaggacacgggagagaccagcatgctaaaaagacctgtgcttttgcatttgcaccaaacagcccatgctgatgaatttgactgcccttcagaacttcagcacacacaggaactctttccacagtggcacttgccaattaaaatagctgctattatagcatctctgacttttctttacactcttctgagggaagtaattcaccctttagcaacttcccatcaacaatatttttataaaattccaatcctggtcatcaacaaagtcttgccaatggtttccatcactctcttggcattggtttacctgccaggtgtgatagcagcaattgtccaacttcataatggaaccaagtataagaagtttccacattggttggataagtggatgttaacaagaaagcagtttgggcttctcagtttcttttttgctgtactgcatgcaatttatagtctgtcttacccaatgaggcgatcctacagatacaagttgctaaactgggcatatcaacaggtccaacaaaataaagaagatgcctggattgagcatgatgtttggagaatggagatttatgtgtctctgggaattgtgggattggcaatactggctctgttggctgtgacatctattccatctgtgagtgactctttgacatggagagaatttcactatattcagagcaagctaggaattgtttcccttctactgggcacaatacacgcattgatttttgcctggaataagtggatagatataaaacaatttgtatggtatacacctccaacttttatgatagctgttttccttccaattgttgtcctgatatttaaaagcatactattcctgccatgcttgaggaagaagatactgaagattagacatggttgggaagacgtcaccaaaattaacaaaactgagatatgttcccagttgtagaattactgtttacacacatttttgttcaatattgatatattttatcaccaacatttcaagtttgtatttgttaataaaatgattattcaaggaaaaaaaaaaaaaaaaaa

SEQ ID NO: 879 - protein, 339 aa, Homo sapiens
MESRKDITNQEELWKMKPRRNLEEDDYLHKDTGETSMLKRPVLLHLHQTAHADEFDCPSELQHTQELFPQWHLPIKIAAIIASLTFLYTLLREVIHPLATSHQQYFYKIPILVINKVLPMVSITLLALVYLPGVIAAIVQLHNGTKYKKFPHWLDKWMLTRKQFGLLSFFFAVLHAIYSLSYPMRRSYRYKLLNWAYQQVQQNKEDAWIEHDVWRMEIYVSLGIVGLAILALLAVTSIPSVSDSLTWREFHYIQSKLGIVSLLLGTIHALIFAWNKWIDIKQFVWYTPPTFMIAVFLPIVVLIFKSILFLPCLRKKILKIRHGWEDVTKINKTEICSQL

SEQ ID NO: 880 - DNA, 2172 bp, Homo sapiens
aaaattgaatattgagataccattctttagtgttaccttttttacccacatgtgtttctgaaaatattggaattttattcatcttaaaaattggacccggccttatttaccatctttaatccattttagtactatgggtgagtacatggaattgaagtctggcttaaatcttcagaaagttatatatctattttattttatttttttgagacagagtctcgctgtgtcacccaggctggagtgcggtgccacaatcttggctcactgcaacctctgagtcccaggttcaagcgatactcatgcctcggcctcctgagtagctgggactacaggcgtgcaccaccacatctggctaatctttttttgtatttttagtagagacggggtttcactgtggtctccatctcctgacctcgtgatccgcctgcctcccaaagtgctgggattacaggcatgagccaccgcacacagctgggactgggtaatttataaagaaaagaggtttaatgactcacagttccgcatggctggagaggcctcaggaaacttacaatcatggtggaaggcgaaggggaagcaaggcacgtcttacatggtggcaggagagaacgagtgaggggggagactgccacaaactttttttttttgagacaagagtctggccctgttgcccaggctggagtgcagtggcatgatctcagctcactgcaacctctgcctcacaggttcaagcaattctcatgcctcagcctcccgcatagctgggaccacaggtatgcaccaccacacctagctaatttttgtagttttagtagagatggggtctcactatgttgctcaggctggtctaaaactcctgggctccagcaatccgcctgccttggcctcccaaagtgctggggttacaggcataagccaccacatccagcctgccacatacttttaaactatcaggtctcatgagaactcatgcactatcacaagaatagcatggggaaaatcccccccataatccaatcacctcccaccaggtctcctccgacacgtgggattgggtggggacacagagccaaaccgtatcagatgctgcaggggctggggacactgagaccactcagacctggtgtctctgtcactcttctgggctctgtctgtctccaggacctccctccccttccatggtatagaaggaaagtgctgtaaggtgcaaattgcacaggaactccttaagacatacatcatccactcagcagttttaggttcgcagcaaaatggagtggaaggaacagaaatttcctgtgcacccctccccgctgtctccgccatatcggcatcctgcatccagagtggtggactggttacaggctatgaacctacactgatgcggcaccaccacccagagtccacgggttatgttggttcacatttactcttgctgtggtatggtctataggtttggacagatgtccgataatcctttttacattttggcatccttgggtagctcgtcttgtaggaatggacttgcttcaaagtggaggcaggcagatccttcagacgggtatatggagccctgttttcagttgcttttctaattctctcttatcgtttacctcaaaatcttcctgaggtctcgcttccttttaaaatccttgtctactttgcagcatcactctgacactccattgattcctcagcacctactgactacacggttaggagtgcaagggtagaattcatgttttattcatctttgggtctgtagcacccagcaaagtgctcagtaaatgcgcagtaattgatttgacctctgaacaaatacacactgtactaagaatctacacaccgaaagacaaaaacaagacaaatttgagtgctacaggtgtcacgcttggcatcacacatgtgcctgtgtattcctctaggtggttaccaggagctctgccactgcatgtccactagtgacgggttcgctccaccaccccagctgggtagccgctgctctcacataaggggtccaattaaaattgccaggaataaattcccccggactttgacttctcaagagctaagaaggtttgctgagtattctggcatgatgtttggtgatcaaacaactgctggccaaaaatgatgagtatttccccctcttgctgaagatgtgctccatac

SEQ ID NO: 881 - DNA, 2455 bp, Homo sapiens
cagcttaaaaatggtttcttgaaatcagtgattagcattcactcaccagtacccctactaaggggtaggcactggtttgtactcctgggaatacaggagtacaccagaatttatttctgcttattgcttttgttgcaaatgccgtggcttcatctgaggaattctagaattcagagggtgtagccctccactctgctgtcttgctatctgctctcattgcatccgtttaacctgcattctgaaagatgtttctcaggtttttccttgacgattttcttcttttctgattctgacaatgttttaaatcattgtactgtggttatcatttctctgcatttattttacccatcttcctttgtaacttgtcctattgtcttttaatttctgcctgttctttatggctttcaacttcataaataacatgttttctcaaatctctttgtgaattccagagagggccaggcacggtggctcacatctgtaatcccagcactttggggaggctgagacgggtggatcacttgaggtcaggagtttgagaccagcctggccaacatggtgaaatcccgtttcactaaaaatacaaaaattacccaggcatggtggcgggcgcctgtaatcccaggtactcgggaggctgagggaggagaatcgcttgaacctgggaggctgagggaggagaatcgcttgaacccgggaggcagaggttgcagtgaaccgagatcatgttgctgcactccagcctggtcaacagagcaagactctgcctcaaaaacaaacaaataaacaaacaaacaaacaaaacagagagattttgctgcaatgtacaaggagcaatttgctcctttaaaaaaataatttttggccaggcacagtggctcacacctgtaatcccagcactttgggaagccaaggtgggtggatcatttgaggtcaggagtttgagatcagcctggccaacatggtgaaacactatctctattaaaaatacaaaaatgtgctcagtgtggtggtgcacatctgtaatctcagcctcccgcatagctgggaccacaggtatgcaccaccacacctagctaatttttgtagttttagtagagatggggtctcactatgttgctcaggctggtctaaaactcctgggctccagcaatccgcctgccttggcctcccaaagtgctggggttacaggcataagccaccacatccagcctgccacatacttttaaactatcaggtctcatgagaactcatgcactatcacaagaatagcatggggaaaatcccccccataatccaatcacctcccaccaggtctcctccgacacgtgggattgggtggggacacagagccaaaccgtatcagatgctgcaggggctggggacactgagaccactcagacctggtgtctctgtcactcttctgggctctgtctgtctccaggacctccctccccttccatggtatagaaggaaagtgctgtaaggtgcaaattgcacaggaactccttaagacatacatcatccactcagcagttttaggttcgcagcaaaatggagtggaaggaacagaaatttcctgtgcacccctccccgctgtctccgccatatcggcatcctgcatccagagtggtggactggttacaggctatgaacctacactgatgcggcaccaccacccagagtccacaggttatgttggttcacatttactcttgctgtggtatggtctataggtttggacagatgtccgataatcctttttacattttggcatccttgggtagctcgtcttgtaggaatggacttgcttcaaagtggaggcaggcagatccttcagacgggtatatggagccctgttttcagttgcttttctaattctctcttatcgtttacctcaaaatcttcctgaggtctcgcttccttttaaaatccttgtctactttgcagcatcactctgacactccattgattcctcagcacctactgactacacggttaggagtgcaagggtagaattcatgttttattcatctttgggtctgtagcacccagcaaagtgctcagtaaatgcgcagtaattgatttgacctctgaacaaatacacactgtactaagaatctacacaccgaaagacaaaaacaagacaaatttgagtgctacaggtgtcacgcttggcatcacacatgtgcctgtgtattcctctaggtggttaccaggagctctgccactgcatgtccactagtgacgggttcgctccaccaccccagctgggtagccgctgctctcacataaggggtccaattaaaattgccaggaataaattcccccggactttgacttctcaagagctaagaaggtttgctgagtattctggcatgatgtttggtgatcaaacaactgctggccaaaaatgatgagtatttccccctcttgctgaagatgtgctccatac

SEQ ID NO: 882 - DNA, 2455 bp, Homo sapiens; identical to SEQ ID NO: 881

SEQ ID NO: 883 - protein, 62 aa, Homo sapiens; identical to SEQ ID NO: 574

SEQ ID NO: 884 - protein, 135 aa, Homo sapiens [sequence omitted]

SEQ ID NO: 885 - protein, 77 aa, Homo sapiens
MHYHKNSMGKIPPIIQSPPTRSPPTRGIGWGHRAKPYQMLQGLGTLRPLRPGVSVTLLGSVCLQDLPPLPWYRRKVL

SEQ ID NO: 886 - protein, 60 aa, Homo sapiens; identical to SEQ ID NO: 586

SEQ ID NO: 887 - protein, 76 aa, Homo sapiens; identical to SEQ ID NO: 584

SEQ ID NO: 888 - protein, 76 aa, Homo sapiens; identical to SEQ ID NO: 575

SEQ ID NO: 889 - protein, 80 aa, Homo sapiens [sequence omitted]

SEQ ID NO: 890 - protein, 72 aa, Homo sapiens
MHYHKNSMGKIPPHNPITSHQVSSDTWDWVGTQSQTVSDAAGAGDTETTQTWCLCHSSGLCLSPGPPSPSMV

SEQ ID NO: 891 - protein, 77 aa, Homo sapiens; identical to SEQ ID NO: 885

SEQ ID NO: 892 - protein, 60 aa, Homo sapiens; identical to SEQ ID NO: 586

SEQ ID NO: 893 - protein, 76 aa, Homo sapiens; identical to SEQ ID NO: 584

SEQ ID NO: 894 - DNA, 2479 bp, Homo sapiens
gtcatattgaacattccagatacctatcattactcgatgctgttgataacagcaagatggctttgaactcagggtcaccaccagctattggaccttactatgaaaaccatggataccaaccggaaaacccctatcccgcacagcccactgtggtccccactgtctacgaggtgcatccggctcagtactacccgtcccccgtgccccagtacgccccgagggtcctgacgcaggcttccaaccccgtcgtctgcacgcagcccaaatccccatccgggacagtgtgcacctcaaagactaagaaagcactgtgcatcaccttgaccctggggaccttcctcgtgggagctgcgctggccgctggcctactctggaagttcatgggcagcaagtgctccaactctgggatagagtgcgactcctcaggtacctgcatcaacccctctaactggtgtgatggcgtgtcacactgccccggcggggaggacgagaatcggtgtgttcgcctctacggaccaaacttcatccttcagatgtactcatctcagaggaagtcctggcaccctgtgtgccaagacgactggaacgagaactacgggcgggcggcctgcagggacatgggctataagaataatttttactctagccaaggaatagtggatgacagcggatccaccagctttatgaaactgaacacaagtgccggcaatgtcgatatctataaaaaactgtaccacagtgatgcctgttcttcaaaagcagtggtttctttacgctgtttagcctgcggggtcaacttgaactcaagccgccagagcaggatcgtgggcggtgagagcgcgctcccgggggcctggccctggcaggtcagcctgcacgtccagaacgtccacgtgtgcggaggctccatcatcacccccgagtggatcgtgacagccgcccactgcgtggaaaaacctcttaacaatccatggcattggacggcatttgcggggattttgagacaatctttcatgttctatggagccggataccaagtacaaaaagtgatttctcatccaaattatgactccaagaccaagaacaatgacattgcgctgatgaagctgcagaagcctctgactttcaacgacctagtgaaaccagtgtgtctgcccaacccaggcatgatgctgcagccagaacagctctgctggatttccgggtggggggccaccgaggagaaagggaagacctcagaagtgctgaacgctgccaaggtgcttctcattgagacacagagatgcaacagcagatatgtctatgacaacctgatcacaccagccatgatctgtgccggcttcctgcaggggaacgtcgattcttgccagggtgacagtggagggcctctggtcacttcgaacaacaatatctggtggctgataggggatacaagctggggttctggctgtgccaaagcttacagaccaggagtgtacgggaatgtgatggtattcacggactggatttatcgacaaatgaaggcaaacggctaatccacatggtcttcgtccttgacgtcgttttacaagaaaacaatggggctggttttgcttccccgtgcatgatttactcttagagatgattcagaggtcacttcatttttattaaacagtgaacttgtctggctttggcactctctgccatactgtgcaggctgcagtggctcccctgcccagcctgctctccctaaccccttgtccgcaaggggtgatggccggctggttgtgggcactggcggtcaattgtggaaggaagagggttggaggctgcccccattgagatcttcctgctgagtcctttccaggggccaattttggatgagcatggagctgtcacttctcagctgctggatgacttgagatgaaaaaggagagacatggaaagggagacagccaggtggcacctgcagcggctgccctctggggccacttggtagtgtccccagcctacttcacaaggggattttgctgatgggttcttagagccttagcagccctggatggtggccagaaataaagggaccagcccttcatgggtggtgacgtggtagtcacttgtaaggggaacagaaacatttttgttcttatggggtgagaatatagacagtgcccttggtgcgagggaagcaattgaaaaggaacttgccctgagcactcctggtgcaggtctccacctgcacattgggtggggctcctgggagggagactcagccttcctcctcatcctccctgaccctgctcctagcaccctggagagtgaatgccccttggtccctggcagggcgccaagtttggcaccatgtcggcctcttcaggcctgatagtcattggaaattgaggtccatgggggaaatcaaggatgctcagtttaaggtacactgtttccatgttatgtttctacacattgatggtggtgaccctgagttcaaagccatctt

SEQ ID NO: 895 - protein, 492 aa, Homo sapiens
MALNSGSPPAIGPYYENHGYQPENPYPAQPTVVPTVYEVHPAQYYPSPVPQYAPRVLTQASNPVVCTQPKSPSGTVCTSKTKKALCITLTLGTFLVGAALAAGLLWKFMGSKCSNSGIECDSSGTCINPSNWCDGVSHCPGGEDENRCVRLYGPNFILQMYSSQRKSWHPVCQDDWNENYGRAACRDMGYKNNFYSSQGIVDDSGSTSFMKLNTSAGNVDIYKKLYHSDACSSKAVVSLRCLACGVNLNSSRQSRIVGGESALPGAWPWQVSLHVQNVHVCGGSIITPEWIVTAAHCVEKPLNNPWHWTAFAGILRQSFMFYGAGYQVQKVISHPNYDSKTKNNDIALMKLQKPLTFNDLVKPVCLPNPGMMLQPEQLCWISGWGATEEKGKTSEVLNAAKVLLIETQRCNSRYVYDNLITPAMICAGFLQGNVDSCQGDSGGPLVTSNNNIWWLIGDTSWGSGCAKAYRPGVYGNVMVFTDWIYRQMKANG

SEQ ID NO: 896 - DNA, 683 bp, Homo sapiens
gtcatattgaacattccagatacctatcattactcgatgctgttgataacagcaagatggctttgaactcagggtcaccaccagctattggaccttactatgaaaaccatggataccaaccggaaaacccctatcccgcacagcccactgtggtccccactgtctacgaggtgcatccggctcagtactacccgtcccccgtgccccagtacgccccgagggtcctgacgcaggcttccaaccccgtcgtctgcacgcagcccaaatccccatccgggacagtgtgcacctcaaagactaagaaagcactgtgcatcaccttgaccctggggaccttcctcgtgggagctgcgctggccgctggcctactctggaagttcatgggcagcaagtgctccaactctgggatagagtgcgactcctcaggtacctgcatcaacccctctaactggtgtgatggcgtgtcacactgccccggcggggaggacgagaatcggtgtgttcgcctctacggaccaaacttcatccttcagatgtactcatctcagaggaagtcctggcaccctgtgtgccaagacgactggaacgagaactacgggcgggcggcctgcagggacatgggctataagaataatttttactctagccaaggaatagtggatgacagcggatccaccagcttt

SEQ ID NO: 897 - protein, 209 aa, Homo sapiens
MALNSGSPPAIGPYYENHGYQPENPYPAQPTVVPTVYEVHPAQYYPSPVPQYAPRVLTQASNPVVCTQPKSPSGTVCTSKTKKALCITLTLGTFLVGAALAAGLLWKFMGSKCSNSGIECDSSGTCINPSNWCDGVSHCPGGEDENRCVRLYGPNFILQMYSSQRKSWHPVCQDDWNENYGRAACRDMGYKNNFYSSQGIVDDSGSTSF

SEQ ID NO: 898 - protein, 27 aa, Homo sapiens
VGEGLYQGVPRAEPGTEARRHYDEGVR

SEQ ID NO: 899 - DNA, 35 bp, Artificial Sequence
  PCR primer
ggatccgccgccaccatgtcactttctagcctgct

SEQ ID NO: 900 - DNA, 27 bp, Artificial Sequence
  PCR primer
gtcgactcagctggaccacagccgcag

SEQ ID NO: 901 - DNA, 34 bp, Artificial Sequence
  PCR primer
ggatccgccgccaccatgggctgcaggctgctct

SEQ ID NO: 902 - DNA, 27 bp, Artificial Sequence
  PCR primer
gtcgactcagaaatcctttctcttgac

SEQ ID NO: 903 - DNA, 936 bp, Homo sapiens
  misc_feature (1)...(): n = A,T,C or G
atgggctgcaggctgntctgctgtgcggttctctgtctcctgggagcggtccccatggaaacgggagttacgcagacaccaagacacctggtcatgggaatgacaaataagaagtctttgaaatgtgaacaacatctgggtcataacgctatgtattggtacaagcaaagtgctaagaagccactggagctcatgtttgtctacagtcttgaagaacgggttgaaaacaacagtgtgccaagtcgcttctcacctgaatgccccaacagctctcacttattccttcacctacacaccctgcagccagaagactcggccctgtatctctgcgccagcagccaagaccggacaagcagctcctacgagcagtacttcgggccgggcaccaggctcacggtcacagaggacctgaaaaacgtgttcccacccgaggtcgctgtgtttgagccatcagaagcagagatctcccacacccaaaaggccacactggtgtgcctggccacaggcttctaccccgaccacgtggagctgagctggtgggtgaatgggaaggaggtgcacagtggggtcagcacagacccgcagcccctcaaggagcagcccgccctcaatgactccagatactgcctgagcagccgcctgagggtctcggccaccttctggcagaacccccgcaaccacttccgctgtcaagtccagttctacgggctctcggagaatgacgagtggacccaggatagggccaaacctgtcacccagatcgtcagcgccgaggcctggggtagagcagactgtggcttcacctccgagtcttaccagcaaggggtcctgtctgccaccatcctctatgagatcttgctagggaaggccaccttgtatgccgtgctggtcagtgccctcgtgctgatggccatggtcaagagaaaggatttctga

SEQ ID NO: 904 - DNA, 834 bp, Homo sapiens
  misc_feature (1)...(): n = A,T,C or G
atgtcactttctagcctgctnaaggtggtcacagcttcactgtggctaggacctggcattgcccagaagataactcaaacccaaccaggaatgttcgtgcaggaaaaggaggctgtgactctggactgcacatatgacaccagtgatcaaagttatggtctcttctggtacaagcagcccagcagtggggaaatgatttttcttatttatcaggggtcttatgacgagcaaaatgcaacagaaggtcgctactcattgaatttccagaaggcaagaaaatccgccaaccttgtcatctccgcttcacaactgggggactcagcaatgtatttctgtgcaatgagagagggcgcgggaggaggaaacaaactcacctttgggacaggcactcagctaaaagtggaactcaatatccagaaccctgaccctgccgtgtaccagctgagagactctaaatccagtgacaagtctgtctgcctattcaccgattttgattctcaaacaaatgtgtcacaaagtaaggattctgatgtgtatatcacagacaaaactgtgctagacatgaggtctatggacttcaagagcaacagtgctgtggcctggagcaacaaatctgactttgcatgtgcaaacgccttcaacaacagcattattccagaagacaccttcttccccagcccagaaagttcctgtgatgtcaagctggtcgagaaaagctttgaaacagatacgaacctaaactttcaaaacctgtcagtgattgggttccgaatcctcctcctgaaagtggccgggtttaatctgctcatgacgctgcggctgtggtccagctga

SEQ ID NO: 905 - protein, 311 aa, Homo sapiens
  variant (1)...(311): Xaa = Any amino acid
MGCRLXCCAVLCLLGAVPMETGVTQTPRHLVMGMTNKKSLKCEQHLGHNAMYWYKQSAKKPLELMFVYSLEERVENNSVPSRFSPECPNSSHLFLHLHTLQPEDSALYLCASSQDRTSSSYEQYFGPGTRLTVTEDLKNVFPPEVAVFEPSEAEISHTQKATLVCLATGFYPDHVELSWWVNGKEVHSGVSTDPQPLKEQPALNDSRYCLSSRLRVSATFWQNPRNHFRCQVQFYGLSENDEWTQDRAKPVTQIVSAEAWGRADCGFTSESYQQGVLSATILYEILLGKATLYAVLVSALVLMAMVKRKDF

SEQ ID NO: 906 - protein, 277 aa, Homo sapiens
MSLSSLLKVVTASLWLGPGIAQKITQTQPGMFVQEKEAVTLDCTYDTSDQSYGLFWYKQPSSGEMIFLIYQGSYDEQNATEGRYSLNFQKARKSANLVISASQLGDSAMYFCAMREGAGGGNKLTFGTGTQLKVELNIQNPDPAVYQLRDSKSSDKSVCLFTDFDSQTNVSQSKDSDVYITDKTVLDMRSMDFKSNSAVAWSNKSDFACANAFNNSIIPEDTFFPSPESSCDVKLVEKSFETDTNLNFQNLSVIGFRILLLKVAGFNLLMTLRLWSS

SEQ ID NO: 907 - DNA, 1536 bp, Homo sapiens
atgtacaacctgttgctgtcctacgacagacatggggaccacctgcagcccctggacctcgtgcccaatcaccagggtctcacccctttcaagctggctggagtggagggtaacactgtgatgtttcagcacctgatgcagaagcggaagcacacccagtggacgtatggaccactgacctcgactctctatgacctcacagagatcgactcctcaggggatgagcagtccctgctggaacttatcatcaccaccaagaagcgggaggctcgccagatcctggaccagacgccggtgaaggagctggtgagcctcaagtggaagcggtacgggcggccgtacttctgcatgctgggtgccatatatctgctgtacatcatctgcttcaccatgtgctgcatctaccgccccctcaagcccaggaccaataaccgcacgagcccccgggacaacaccctcttacagcagaagctacttcaggaagcctacatgacccctaaggacgatatccggctggtcggggagctggtgactgtcattggggctatcatcatcctgctggtagaggttccagacatcttcagaatgggggtcactcgcttctttggacagaccatccttgggggcccattccatgtcctcatcatcacctatgccttcatggtgctggtgaccatggtgatgcggctcatcagtgccagcggggaggtggtacccatgtcctttgcactcgtgctgggctggtgcaacgtcatgtacttcgcccgaggattccagatgctaggccccttcaccatcatgattcagaagatgatttttggcgacctgatgcgattctgctggctgatggctgtggtcatcctgggctttgcttcagccttctatatcatcttccagacagaggaccccgaggagctaggccacttctacgactaccccatggccctgttcagcaccttcgagctgttccttaccatcatcgatggcccagccaactacaacgtggacctgcccttcatgtacagcatcacctatgctgcctttgccatcatcgccacactgctcatgctcaacctcctcattgccatgatgggcgacactcactggcgagtggcccatgagcgggatgagctgtggagggcccagattgtggccaccacggtgatgctggagcggaagctgcctcgctgcctgtggcctcgctccgggatctgcggacgggagtatggcctgggagaccgctggttcctgcgggtggaagacaggcaagatctcaaccggcagcggatccaacgctacgcacaggccttccacacccggggctctgaggatttggacaaagactcagtggaaaaactagagctgggctgtcccttcagcccccacctgtcccttcctatgccctcagtgtctcgaagtacctcccgcagcagtgccaattgggaaaggcttcggcaagggaccctgaggagagacctgcgtgggataatcaacaggggtctggaggacggggagagctgggaatatcagatctga

SEQ ID NO: 908 - DNA, 1533 bp, Homo sapiens
atgtacaacctgttgctgtcctacgacagacatggggaccacctgcagcccctggacctcgtgcccaatcaccagggtctcacccctttcaagctggctggagtggagggtaacactgtgatgtttcagcacctgatgcagaagcggaagcacacccagtggacgtatggaccactgacctcgactctctatgacctcacagagatcgactcctcaggggatgagcagtccctgctggaacttatcatcaccaccaagaagcgggaggctcgccagatcctggaccagacgccggtgaaggagctggtgagcctcaagtggaagcggtacgggcggccgtacttctgcatgctgggtgccatatatctgctgtacatcatctgcttcaccatgtgctgcatctaccgccccctcaagcccaggaccaataaccgcacgagcccccgggacaacaccctcttacagcagaagctacttcaggaagcctacatgacccctaaggacgatatccggctggtcggggagctggtgactgtcattggggctatcatcatcctgctggtagaggttccagacatcttcagaatgggggtcactcgcttctttggacagaccatccttgggggcccattccatgtcctcatcatcacctatgccttcatggtgctggtgaccatggtgatgcggctcatcagtgccagcggggaggtggtacccatgtcctttgcactcgtgctgggctggtgcaacgtcatgtacttcgcccgaggattccagatgctaggccccttcaccatcatgattcagaagatgatttttggcgacctgatgcgattctgctggctgatggctgtggtcatcctgggctttgcttcagccttctatatcatcttccagacagaggaccccgaggagctaggccacttctacgactaccccatggccctgttcagcaccttcgagctgttccttaccatcatcgatggcccagccaactacaacgtggacctgcccttcatgtacagcatcacctatgctgcctttgccatcatcgccacactgctcatgctcaacctcctcattgccatgatgggcgacactcactggcgagtggcccatgagcgggatgagctgtggagggcccagattgtggccaccacggtgatgctggagcggaagctgcctcgctgcctgtggcctcgctccgggatctgcggacgggagtatggcctgggagaccgctggttcctgcgggtggaagacaggcaagatctcaaccggcagcggatccaacgctacgcacaggccttccacacccggggctctgaggatttggacaaagactcagtggaaaaactagagctgggctgtcccttcagcccccacctgtcccttcctatgccctcagtgtctcgaagtacctcccgcagcagtgccaattgggaaaggcttcggcaagggaccctgaggagagacctgcgtgggataatcaacaggggtctggaggacggggagagctgggaatatcagatc

SEQ ID NO: 909 - protein, 511 aa, Homo sapiens
MYNLLLSYDRHGDHLQPLDLVPNHQGLTPFKLAGVEGNTVMFQHLMQKRKHTQWTYGPLTSTLYDLTEIDSSGDEQSLLELIITTKKREARQILDQTPVKELVSLKWKRYGRPYFCMLGAIYLLYIICFTMCCIYRPLKPRTNNRTSPRDNTLLQQKLLQEAYMTPKDDIRLVGELVTVIGAIIILLVEVPDIFRMGVTRFFGQTILGGPFHVLIITYAFMVLVTMVMRLISASGEVVPMSFALVLGWCNVMYFARGFQMLGPFTIMIQKMIFGDLMRFCWLMAVVILGFASAFYIIFQTEDPEELGHFYDYPMALFSTFELFLTIIDGPANYNVDLPFMYSITYAAFAIIATLLMLNLLIAMMGDTHWRVAHERDELWRAQIVATTVMLERKLPRCLWPRSGICGREYGLGDRWFLRVEDRQDLNRQRIQRYAQAFHTRGSEDLDKDSVEKLELGCPFSPHLSLPMPSVSRSTSRSSANWERLRQGTLRRDLRGIINRGLEDGESWEYQI

SEQ ID NO: 910 - protein, 134 aa, Homo sapiens
MYNLLLSYDRHGDHLQPLDLVPNHQGLTPFKLAGVEGNTVMFQHLMQKRKHTQWTYGPLTSTLYDLTEIDSSGDEQSLLELIITTKKREARQILDQTPVKELVSLKWKRYGRPYFCMLGAIYLLYIICFTMCCI

SEQ ID NO: 911 - protein, 55 aa, Homo sapiens
AYRPLKPRTNNRTSPRDNTLLQQKLLQEAYMTPKDDIRLVGELVTVIGAIIILLV

SEQ ID NO: 912 - protein, 39 aa, Homo sapiens
EVPDIFRMGVTRFFGQTILGGPFHVLIITYAFMVLVTMV

SEQ ID NO: 913 - protein, 19 aa, Homo sapiens
MRLISASGEVVPMSFALVL

SEQ ID NO: 914 - protein, 52 aa, Homo sapiens
GWCNVMYFARGFQMLGPFTIMIQKMIFGDLMRFCWLMAVVILGFASAFYIIF

SEQ ID NO: 915 - protein, 213 aa, Homo sapiens
QTEDPEELGHFYDYPMALFSTFELFLTIIDGPANYNVDLPFMYSITYAAFAIIATLLMLNLLIAMMGDTHWRVAHERDELWRAQIVATTVMLERKLPRCLWPRSGICGREYGLGDRWFLRVEDRQDLNRQRIQRYAQAFHTRGSEDLDKDSVEKLELGCPFSPHLSLPMPSVSRSTSRSSANWERLRQGTLRRDLRGIINRGLEDGESWEYQI

SEQ ID NO: 916 - DNA, 1302 bp, Homo sapiens
tggacaaagggggtcacacattccttccatacggttgagcctctacctgcctggtgctggtcacagttcagcttcttcatgatggtggatcccaatggcaatgaatccagtgctacatacttcatcctaataggcctccctggtttagaagaggctcagttctggttggccttcccattgtgctccctctaccttattgctgtgctaggtaacttgacaatcatctacattgtgcggactgagcacagcctgcatgagcccatgtatatatttctttgcatgctttcaggcattgacatcctcatctccacctcatccatgcccaaaatgctggccatcttctggttcaattccactaccatccagtttgatgcttgtctgctacagatgtttgccatccactccttatctggcatggaatccacagtgctgctggccatggcttttgaccgctatgtggccatctgtcacccactgcgccatgccacagtacttacgttgcctcgtgtcaccaaaattggtgtggctgctgtggtgcggggggctgcactgatggcaccccttcctgtcttcatcaagcagctgcccttctgccgctccaatatcctttcccattcctactgcctacaccaagatgtcatgaagctggcctgtgatgatatccgggtcaatgtcgtctatggccttatcgtcatcatctccgccattggcctggactcacttctcatctccttctcatatctgcttattcttaagactgtgttgggcttgacacgtgaagcccaggccaaggcatttggcacttgcgtctctcatgtgtgtgctgtgttcatattctatgtacctttcattggattgtccatggtgcatcgctttagcaagcggcgtgactctccgctgcccgtcatcttggccaatatctatctgctggttcctcctgtgctcaacccaattgtctatggagtgaagacaaaggagattcgacagcgcatccttcgacttttccatgtggccacacacgcttcagagccctaggtgtcagtgatcaaacttcttttccattcagagtcctctgattcagattttaatgttaacattttggaagacagtattcagaaaaaaaatttccttaataaaaatacaactcagatccttcaaatatgaaactggttggggaatctccattttttcaatattattttcttctttgttttcttgctacatataattattaataccctgactaggttgtggtttgagggttattacttttcattttaccatgcagtccaaatctaaact

SEQ ID NO: 917 - DNA, 2061 bp, Homo sapiens
acgattcgacagcgcatccttcgacttttccatgtggccacacacgcttcagagccctaggtgtcagtgatcaaacttcttttccattcagagtcctctgattcagattttaatgttaacattttggaagacagtattcagaaaaaaaatttccttaataaaaatacaactcagatccttcaaatatgaaactggttggggaatctccattttttcaatattattttcttctttgttttcttgctacatataattattaataccctgactaggttgtggttggagggttattacttttcattttaccatgcagtccaaatctaaactgcttctactgatggtttacagcattctgagataagaatggtacatctagagaacatttgccaaaggcctaagcacggcaaaggaaaataaacacagaatataataaaatgagataatctagcttaaaactataacttcctcttcagaactcccaaccacattggatctcagaaaaatgctgtcttcaaaatgacttctacagagaagaaataatttttcctctggacactagcacttaaggggaagattggaagtaaagccttgaaaagagtacatttacctacgttaatgaaagttgacacactgttctgagagttttcacagcatatggaccctgtttttcctatttaattttcttatcaaccctttaattaggcaaagatattattagtaccctcattgtagccatgggaaaattgatgttcagtggggatcagtgaattaaatggggtcatacaagtataaaaattaaaaaaaaaggacttcatgcccaatctcatatgatgtggaagaactgttagagagaccaacagggtagtgggttagagatttccagagtcttacattttctagaggaggtatttaatttcttctcactcatccagtgttgtatttaggaatttcctggcaacagaactcatggctttaatcccactagctattgcttattgtcctggtccaattgccaattacctgtgtcttggaagaagtgatttctaggttcaccattatggaagattcttattcagaaagtctgcatagggcttatagcaagttatttatttttaaaagttccataggtgattctgataggcagtgaggttagggagccaccagttatgatgggaagtatggaatggcaggtcttgaagataacattggccttttgagtgtgactcgtagctggaaagtgagggaatcttcaggaccatgctttatttggggctttgtgcagtatggaacagggactttgagaccaggaaagcaatctgacttaggcatgggaatcaggcatttttgcttctgaggggctattaccaagggttaataggtttcatcttcaacaggatatgacaacagtgttaaccaagaaactcaaattacaaatactaaaacatgtgatcatatatgtggtaagtttcattttctttttcaatcctcaggttccctgatatggattcctataacatgctttcatccccttttgtaatggatatcatatttggaaatgcctatttaatacttgtatttgctgctggactgtaagcccatgagggcactgtttattattgaatgtcatctctgttcatcattgactgctctttgctcatcattgaatcccccagcaaagtgcctagaacataatagtgcttatgcttgacaccggttatttttcatcaaacctgattccttctgtcctgaacacatagccaggcaattttccagccttctttgagttgggtattattaaattctggccattacttccaatgtgagtggaagtgacatgtgcaatttctatacctggctcataaaaccctcccatgtgcagcctttcatgttgacattaaatgtgacttgggaagctatgtgttacacagagtaaatcaccagaagcctggatttctgaaaaaactgtgcagagccaaacctctgtcatttgcaactcccacttgtatttgtacgaggcagttggataagtgaaaaataaagtactattgtgtcaagtctctg

SEQ ID NO: 918 - DNA, 957 bp, Homo sapiens
atgatggtggatcccaatggcaatgaatccagtgctacatacttcatcctaataggcctccctggtttagaagaggctcagttctggttggccttcccattgtgctccctctaccttattgctgtgctaggtaacttgacaatcatctacattgtgcggactgagcacagcctgcatgagcccatgtatatatttctttgcatgctttcaggcattgacatcctcatctccacctcatccatgcccaaaatgctggccatcttctggttcaattccactaccatccagtttgatgcttgtctgctacagatgtttgccatccactccttatctggcatggaatccacagtgctgctggccatggcttttgaccgctatgtggccatctgtcacccactgcgccatgccacagtacttacgttgcctcgtgtcaccaaaattggtgtggctgctgtggtgcggggggctgcactgatggcaccccttcctgtcttcatcaagcagctgcccttctgccgctccaatatcctttcccattcctactgcctacaccaagatgtcatgaagctggcctgtgatgatatccgggtcaatgtcgtctatggccttatcgtcatcatctccgccattggcctggactcacttctcatctccttctcatatctgcttattcttaagactgtgttgggcttgacacgtgaagcccaggccaaggcatttggcacttgcgtctctcatgtgtgtgctgtgttcatattctatgtacctttcattggattgtccatggtgcatcgctttagcaagcggcgtgactctccgctgcccgtcatcttggccaatatctatctgctggttcctcctgtgctcaacccaattgtctatggagtgaagacaaaggagattcgacagcgcatccttcgacttttccatgtggccacacacgcttcagagccctag

SEQ ID NO: 919 - DNA, 954 bp, Homo sapiens
atgatggtggatcccaatggcaatgaatccagtgctacatacttcatcctaataggcctccctggtttagaagaggctcagttctggttggccttcccattgtgctccctctaccttattgctgtgctaggtaacttgacaatcatctacattgtgcggactgagcacagcctgcatgagcccatgtatatatttctttgcatgctttcaggcattgacatcctcatctccacctcatccatgcccaaaatgctggccatcttctggttcaattccactaccatccagtttgatgcttgtctgctacagatgtttgccatccactccttatctggcatggaatccacagtgctgctggccatggcttttgaccgctatgtggccatctgtcacccactgcgccatgccacagtacttacgttgcctcgtgtcaccaaaattggtgtggctgctgtggtgcggggggctgcactgatggcaccccttcctgtcttcatcaagcagctgcccttctgccgctccaatatcctttcccattcctactgcctacaccaagatgtcatgaagctggcctgtgatgatatccgggtcaatgtcgtctatggccttatcgtcatcatctccgccattggcctggactcacttctcatctccttctcatatctgcttattcttaagactgtgttgggcttgacacgtgaagcccaggccaaggcatttggcacttgcgtctctcatgtgtgtgctgtgttcatattctatgtacctttcattggattgtccatggtgcatcgctttagcaagcggcgtgactctccgctgcccgtcatcttggccaatatctatctgctggttcctcctgtgctcaacccaattgtctatggagtgaagacaaaggagattcgacagcgcatccttcgacttttccatgtggccacacacgcttcagagccc

SEQ ID NO: 920 - protein, 318 aa, Homo sapiens
MMVDPNGNESSATYFILIGLPGLEEAQFWLAFPLCSLYLIAVLGNLTIIYIVRTEHSLHEPMYIFLCMLSGIDILISTSSMPKMLAIFWFNSTTIQFDACLLQMFAIHSLSGMESTVLLAMAFDRYVAICHPLRHATVLTLPRVTKIGVAAVVRGAALMAPLPVFIKQLPFCRSNILSHSYCLHQDVMKLACDDIRVNVVYGLIVIISAIGLDSLLISFSYLLILKTVLGLTREAQAKAFGTCVSHVCAVFIFYVPFIGLSMVHRFSKRRDSPLPVILANIYLLVPPVLNPIVYGVKTKEIRQRILRLFHVATHASEP

SEQ ID NO: 921 - protein, 28 aa, Homo sapiens
MMVDPNGNESSATYFILIGLPGLEEAQF

SEQ ID NO: 922 - protein, 9 aa, Homo sapiens
RTEHSLHEP

SEQ ID NO: 923 - protein, 21 aa, Homo sapiens
KMLAIFWFNSTTIQFDACLLQ

SEQ ID NO: 924 - protein, 20 aa, Homo sapiens
DRYVAICHPLRHATVLTLPR

SEQ ID NO: 925 - protein, 37 aa, Homo sapiens
FIKQLPFCRSNILSHSYCLHQDVMKLACDDIRVNVVY

SEQ ID NO: 926 - protein, 13 aa, Homo sapiens
KTVLGLTREAQAK

SEQ ID NO: 927 - protein, 10 aa, Homo sapiens
VHRFSKRRDS

SEQ ID NO: 928 - protein, 22 aa, Homo sapiens
KTKEIRQRILRLFHVATHASEP

SEQ ID NO: 929 - DNA, 3245 bp, Homo sapiens
gtcgacccacgcgtccgcgcgagctaagcaggaggcggaggcggaggcggagggcgaggggcggggagcgccgcctggagcgcggcaggtcatattgaacattccagatacctatcattactcgatgctgttgataacagcaagatggctttgaactcagggtcaccaccagctattggaccttactatgaaaaccatggataccaaccggaaaacccctatcccgcacagcccactgtggtccccactgtctacgaggtgcatccggctcagtactacccgtcccccgtgccccagtacgccccgagggtcctgacgcaggcttccaaccccgtcgtctgcacgcagcccaaatccccatccgggacagtgtgcacctcaaagactaagaaagcactgtgcatcaccttgaccctggggaccttcctcgtgggagctgcgctggccgctggcctactctggaagttcatgggcagcaagtgctccaactctgggatagagtgcgactcctcaggtacctgcatcaacccctctaactggtgtgatggcgtgtcacactgccccggcggggaggacgagaatcggtgtgttcgcctctacggatcaaacttcatccttcaggtgtactcatctcagaggaagtcctggcaccctgtgtgccaagacgactggaacgagaactacgggcgggcggcctgcagggacatgggctataagaataatttttactctagccaaggaatagtggatgacagcggatccaccagctttatgaaactgaacacaagtgccggcaatgtcgatatctataaaaaactgtaccacagtgatgcctgttcttcaaaagcagtggtttctttacgctgtatagcctgcggggtcaacttgaactcaagccgccagagcaggattgtgggcggcgagagcgcgctcccgggggcctggccctggcaggtcagcctgcacgtccagaacgtccacgtgtgcggaggctccatcatcacccccgagtggatcgtgacagccgcccactgcgtggaaaaacctcttaacaatccatggcattggacggcatttgcggggattttgagacaatctttcatgttctatggagccggataccaagtagaaaaagtgatttctcatccaaattatgactccaagaccaagaacaatgacattgcgctgatgaagctgcagaagcctctgactttcaacgacctagtgaaaccagtgtgtctgcccaacccaggcatgatgctgcagccagaacagctctgctggatttccgggtggggggccaccgaggagaaagggaagacctcagaagtgctgaacgctgccaaggtgcttctcattgagacacagagatgcaacagcagatatgtctatgacaacctgatcacaccagccatgatctgtgccggcttcctgcaggggaacgtcgattcttgccagggtgacagtggagggcctctggtcacttcgaagaacaatatctggtggctgataggggatacaagctggggttctggctgtgccaaagcttacagaccaggagtgtacgggaatgtgatggtattcacggactggatttatcgacaaatgagggcagacggctaatccacatggtcttcgtccttgacgtcgttttacaagaaaacaatggggctggttttgcttccccgtgcatgatttactcttagagatgattcagaggtcacttcatttttattaaacagtgaacttgtctggctttggcactctctgccattctgtgcaggctgcagtggctcccctgcccagcctgctctccctaaccccttgtccgcaaggggtgatggccggctggttgtgggcactggcggtcaagtgtggaggagaggggtggaggctgccccattgagatcttcctgctgagtcctttccaggggccaattttggatgagcatggagctgtcacctctcagctgctggatgacttgagatgaaaaaggagagacatggaaagggagacagccaggtggcacctgcagcggctgccctctggggccacttggtagtgtccccagcctacctctccacaaggggattttgctgatgggttcttagagccttagcagccctggatggtggccagaaataaagggaccagcccttcatgggtggtgacgtggtagtcacttgtaaggggaacagaaacatttttgttcttatggggtgagaatatagacagtgcccttggtgcgagggaagcaattgaaaaggaacttgccctgagcactcctggtgcaggtctccacctgcacattgggtggggctcctgggagggagactcagccttcctcctcatcctccctgaccctgctcctagcaccctggagagtgcacatgccccttggtcctggcagggcgccaagtctggcaccatgttggcctcttcaggcctgctagtcactggaaattgaggtccatgggggaaatcaaggatgctcagtttaaggtacactgtttccatgttatgtttctacacattgctacctcagtgctcctggaaacttagcttttgatgtctccaagtagtccaccttcatttaactctttgaaactgtatcatctttgccaagtaagagtggtggcctatttcagctgctttgacaaaatgactggctcctgacttaacgttctataaatgaatgtgctgaagcaaagtgcccatggtggcggcgaagaagagaaagatgtgttttgttttggactctctgtggtcccttccaatgctgtgggtttccaaccaggggaagggtcccttttgcattgccaagtgccataaccatgagcactactctaccatggttctgcctcctggccaagcaggctggtttgcaagaatgaaatgaatgattctacagctaggacttaaccttgaaatggaaagtcttgcaatcccatttgcaggatccgtctgtgcacatgcctctgtagagagcagcattcccagggaccttggaaacagttggcactgtaaggtgcttgctccccaagacacatcctaaaaggtgttgtaatggtgaaaacgtcttccttctttattgccccttcttatttatgtgaacaactgtttgtctttttttgtatcttttttaaactgtaaagttcaattgtgaaaatgaatatcatgcaaataaattatgcgatttttttttcaaagtaaaaaaaaaaaaaaaaaaaaaaagggcggccgc

SEQ ID NO: 930 - DNA, 1479 bp, Homo sapiens
atggctttgaactcagggtcaccaccagctattggaccttactatgaaaaccatggataccaaccggaaaacccctatcccgcacagcccactgtggtccccactgtctacgaggtgcatccggctcagtactacccgtcccccgtgccccagtacgccccgagggtcctgacgcaggcttccaaccccgtcgtctgcacgcagcccaaatccccatccgggacagtgtgcacctcaaagactaagaaagcactgtgcatcaccttgaccctggggaccttcctcgtgggagctgcgctggccgctggcctactctggaagttcatgggcagcaagtgctccaactctgggatagagtgcgactcctcaggtacctgcatcaacccctctaactggtgtgatggcgtgtcacactgccccggcggggaggacgagaatcggtgtgttcgcctctacggatcaaacttcatccttcaggtgtactcatctcagaggaagtcctggcaccctgtgtgccaagacgactggaacgagaactacgggcgggcggcctgcagggacatgggctataagaataatttttactctagccaaggaatagtggatgacagcggatccaccagctttatgaaactgaacacaagtgccggcaatgtcgatatctataaaaaactgtaccacagtgatgcctgttcttcaaaagcagtggtttctttacgctgtatagcctgcggggtcaacttgaactcaagccgccagagcaggattgtgggcggcgagagcgcgctcccgggggcctggccctggcaggtcagcctgcacgtccagaacgtccacgtgtgcggaggctccatcatcacccccgagtggatcgtgacagccgcccactgcgtggaaaaacctcttaacaatccatggcattggacggcatttgcggggattttgagacaatctttcatgttctatggagccggataccaagtagaaaaagtgatttctcatccaaattatgactccaagaccaagaacaatgacattgcgctgatgaagctgcagaagcctctgactttcaacgacctagtgaaaccagtgtgtctgcccaacccaggcatgatgctgcagccagaacagctctgctggatttccgggtggggggccaccgaggagaaagggaagacctcagaagtgctgaacgctgccaaggtgcttctcattgagacacagagatgcaacagcagatatgtctatgacaacctgatcacaccagccatgatctgtgccggcttcctgcaggggaacgtcgattcttgccagggtgacagtggagggcctctggtcacttcgaagaacaatatctggtggctgataggggatacaagctggggttctggctgtgccaaagcttacagaccaggagtgtacgggaatgtgatggtattcacggactggatttatcgacaaatgagggcagacggctaa

SEQ ID NO: 931 - DNA, 1476 bp, Homo sapiens
atggctttgaactcagggtcaccaccagctattggaccttactatgaaaaccatggataccaaccggaaaacccctatcccgcacagcccactgtggtccccactgtctacgaggtgcatccggctcagtactacccgtcccccgtgccccagtacgccccgagggtcctgacgcaggcttccaaccccgtcgtctgcacgcagcccaaatccccatccgggacagtgtgcacctcaaagactaagaaagcactgtgcatcaccttgaccctggggaccttcctcgtgggagctgcgctggccgctggcctactctggaagttcatgggcagcaagtgctccaactctgggatagagtgcgactcctcaggtacctgcatcaacccctctaactggtgtgatggcgtgtcacactgccccggcggggaggacgagaatcggtgtgttcgcctctacggatcaaacttcatccttcaggtgtactcatctcagaggaagtcctggcaccctgtgtgccaagacgactggaacgagaactacgggcgggcggcctgcagggacatgggctataagaataatttttactctagccaaggaatagtggatgacagcggatccaccagctttatgaaactgaacacaagtgccggcaatgtcgatatctataaaaaactgtaccacagtgatgcctgttcttcaaaagcagtggtttctttacgctgtatagcctgcggggtcaacttgaactcaagccgccagagcaggattgtgggcggcgagagcgcgctcccgggggcctggccctggcaggtcagcctgcacgtccagaacgtccacgtgtgcggaggctccatcatcacccccgagtggatcgtgacagccgcccactgcgtggaaaaacctcttaacaatccatggcattggacggcatttgcggggattttgagacaatctttcatgttctatggagccggataccaagtagaaaaagtgatttctcatccaaattatgactccaagaccaagaacaatgacattgcgctgatgaagctgcagaagcctctgactttcaacgacctagtgaaaccagtgtgtctgcccaacccaggcatgatgctgcagccagaacagctctgctggatttccgggtggggggccaccgaggagaaagggaagacctcagaagtgctgaacgctgccaaggtgcttctcattgagacacagagatgcaacagcagatatgtctatgacaacctgatcacaccagccatgatctgtgccggcttcctgcaggggaacgtcgattcttgccagggtgacagtggagggcctctggtcacttcgaagaacaatatctggtggctgataggggatacaagctggggttctggctgtgccaaagcttacagaccaggagtgtacgggaatgtgatggtattcacggactggatttatcgacaaatgagggcagacggc

SEQ ID NO: 932 - protein, 492 aa, Homo sapiens
MALNSGSPPAIGPYYENHGYQPENPYPAQPTVVPTVYEVHPAQYYPSPVPQYAPRVLTQASNPVVCTQPKSPSGTVCTSKTKKALCITLTLGTFLVGAALAAGLLWKFMGSKCSNSGIECDSSGTCINPSNWCDGVSHCPGGEDENRCVRLYGSNFILQVYSSQRKSWHPVCQDDWNENYGRAACRDMGYKNNFYSSQGIVDDSGSTSFMKLNTSAGNVDIYKKLYHSDACSSKAVVSLRCIACGVNLNSSRQSRIVGGESALPGAWPWQVSLHVQNVHVCGGSIITPEWIVTAAHCVEKPLNNPWHWTAFAGILRQSFMFYGAGYQVEKVISHPNYDSKTKNNDIALMKLQKPLTFNDLVKPVCLPNPGMMLQPEQLCWISGWGATEEKGKTSEVLNAAKVLLIETQRCNSRYVYDNLITPAMICAGFLQGNVDSCQGDSGGPLVTSKNNIWWLIGDTSWGSGCAKAYRPGVYGNVMVFTDWIYRQMRADG

SEQ ID NO: 933 - protein, 100 aa, Homo sapiens
MALNSGSPPAIGPYYENHGYQPENPYPAQPTVVPTVYEVHPAQYYPSPVPQYAPRVLTQASNPVVCTQPKSPSGTVCTSKTKKALCITLTLGTFLVGAAL

SEQ ID NO: 934 - protein, 393 aa, Homo sapiens
LAAGLLWKFMGSKCSNSGIECDSSGTCINPSNWCDGVSHCPGGEDENRCVRLYGSNFILQVYSSQRKSWHPVCQDDWNENYGRAACRDMGYKNNFYSSQGIVDDSGSTSFMKLNTSAGNVDIYKKLYHSDACSSKAVVSLRCIACGVNLNSSRQSRIVGGESALPGAWPWQVSLHVQNVHVCGGSIITPEWIVTAAHCVEKPLNNPWHWTAFAGILRQSFMFYGAGYQVEKVISHPNYDSKTKNNDIALMKLQKPLTFNDLVKPVCLPNPGMMLQPEQLCWISGWGATEEKGKTSEVLNAAKVLLIETQRCNSRYVYDNLITPAMICAGFLQGNVDSCQGDSGGPLVTSKNNIWWLIGDTSWGSGCAKAYRPGVYGNVMVFTDWIYRQMRADG

SEQ ID NO: 935 - DNA, 22 bp, Artificial Sequence
  PCR Primer
gtgctgtgggagtccccgcggc

SEQ ID NO: 936 - DNA, 36 bp, Artificial Sequence
  PCR Primer
cgtgaactcgagtcattagattaacctcgtggacgc

SEQ ID NO: 937 - DNA, 22 bp, Artificial Sequence
  PCR Primer
gtgctgtgggagtccccgcggc

SEQ ID NO: 938 - DNA, 1158 bp, Homo sapiens
catatgcagcatcaccaccatcaccacgtgctgtgggagtccccgcggcagtgcagcagctggacactttgcgagggcttttgctggctgctgctgctgcccgtcatgctactcatcgtagcccgcccggtgaagctcgctgctttccctacctccttaagtgactgccaaacgcccaccggctggaattgctctggttatgatgacagagaaaatgatctcttcctctgtgacaccaacacctgtaaatttgatggggaatgtttaagaattggagacactgtgacttgcgtctgtcagttcaagtgcaacaatgactatgtgcctgtgtgtggctccaatggggagagctaccagaatgagtgttacctgcgacaggctgcatgcaaacagcagagtgagatacttgtggtgtcagaaggatcatgtgccacagatgcaggatcaggatctggagatggagtccatgaaggctctggagaaactagtcaaaaggagacatccacctgtgatatttgccagtttggtgcagaatgtgacgaagatgccgaggatgtctggtgtgtgtgtaatattgactgttctcaaaccaacttcaatcccctctgcgcttctgatgggaaatcttatgataatgcatgccaaatcaaagaagcatcgtgtcagaaacaggagaaaattgaagtcatgtctttgggtcgatgtcaagataacacaactacaactactaagtctgaagatgggcattatgcaagaacagattatgcagagaatgctaacaaattagaagaaagtgccagagaacaccacataccttgtccggaacattacaatggcttctgcatgcatgggaagtgtgagcattctatcaatatgcaggagccatcttgcaggtgtgatgctggttatactggacaacactgtgaaaaaaaggactacagtgttctatacgttgttcccggtcctgtacgatttcagtatgtcttaatcgcagctgtgattggaacaattcagattgctgtcatctgtgtggtggtcctctgcatcacaaggaaatgccccagaagcaacagaattcacagacagaagcaaaatacagggcactacagttcagacaatacaacaagagcgtccacgaggttaatctaatgactcgag

SEQ ID NO: 939 - DNA, 1020 bp, Homo sapiens
atgcagcatcaccaccatcaccacgactgccaaacgcccaccggctggaattgctctggttatgatgacagagaaaatgatctcttcctctgtgacaccaacacctgtaaatttgatggggaatgtttaagaattggagacactgtgacttgcgtctgtcagttcaagtgcaacaatgactatgtgcctgtgtgtggctccaatggggagagctaccagaatgagtgttacctgcgacaggctgcatgcaaacagcagagtgagatacttgtggtgtcagaaggatcatgtgccacagatgcaggatcaggatctggagatggagtccatgaaggctctggagaaactagtcaaaaggagacatccacctgtgatatttgccagtttggtgcagaatgtgacgaagatgccgaggatgtctggtgtgtgtgtaatattgactgttctcaaaccaacttcaatcccctctgcgcttctgatgggaaatcttatgataatgcatgccaaatcaaagaagcatcgtgtcagaaacaggagaaaattgaagtcatgtctttgggtcgatgtcaagataacacaactacaactactaagtctgaagatgggcattatgcaagaacagattatgcagagaatgctaacaaattagaagaaagtgccagagaacaccacataccttgtccggaacattacaatggcttctgcatgcatgggaagtgtgagcattctatcaatatgcaggagccatcttgcaggtgtgatgctggttatactggacaacactgtgaaaaaaaggactacagtgttctatacgttgttcccggtcctgtacgatttcagtatgtcttaatcgcagctgtgattggaacaattcagattgctgtcatctgtgtggtggtcctctgcatcacaaggaaatgccccagaagcaacagaattcacagacagaagcaaaatacagggcactacagttcagacaatacaacaagagcgtccacgaggttaatctaatgactcgag

SEQ ID NO: 940 - protein, 336 aa, Homo sapiens
MQHHHHHHDCQTPTGWNCSGYDDRENDLFLCDTNTCKFDGECLRIGDTVTCVCQFKCNNDYVPVCGSNGESYQNECYLRQAACKQQSEILVVSEGSCATDAGSGSGDGVHEGSGETSQKETSTCDICQFGAECDEDAEDVWCVCNIDCSQTNFNPLCASDGKSYDNACQIKEASCQKQEKIEVMSLGRCQDNTTTTTKSEDGHYARTDYAENANKLEESAREHHIPCPEHYNGFCMHGKCEHSINMQEPSCRCDAGYTGQHCEKKDYSVLYVVPGPVRFQYVLIAAVIGTIQIAVICVVVLCITRKCPRSNRIHRQKQNTGHYSSDNTTRASTRLI

SEQ ID NO: 941 - protein, 381 aa, Homo sapiens
MQHHHHHHVLWESPRQCSSWTLCEGFCWLLLLPVMLLIVARPVKLAAFPTSLSDCQTPTGWNCSGYDDRENDLFLCDTNTCKFDGECLRIGDTVTCVCQFKCNNDYVPVCGSNGESYQNECYLRQAACKQQSEILVVSEGSCATDAGSGSGDGVHEGSGETSQKETSTCDICQFGAECDEDAEDVWCVCNIDCSQTNFNPLCASDGKSYDNACQIKEASCQKQEKIEVMSLGRCQDNTTTTTKSEDGHYARTDYAENANKLEESAREHHIPCPEHYNGFCMHGKCEHSINMQEPSCRCDAGYTGQHCEKKDYSVLYVVPGPVRFQYVLIAAVIGTIQIAVICVVVLCITRKCPRSNRIHRQKQNTGHYSSDNTTRASTRLI

SEQ ID NO: 942 - DNA, 45 bp, Homo sapiens
ctgctggcgaacggcagaatgcctaccgtgctgcagtgcgtgaac

SEQ ID NO: 943 - protein, 15 aa, Homo sapiens
LLANGRMPTVLQCVN
